(19) United States
(12) Patent Application Publication
(10) Pub. No.: US 2008/0307537 A1
(43) Pub. Date: Dec. 11, 2008

(54) Compositions and Methods for the Identification, Assessment, Prevention, and Therapy of Neurological Diseases, Disorders and Conditions

(75) Inventor: Robert M. Bachoo, Roslindale, MA (US)

Correspondence Address: FOLEY HOAG, LLP;PATENT GROUP, WORLD TRADE CENTER WEST, 155 SEAPORT BLVD, BOSTON, MA, 02110, US

(73) Assignee: DANA-FARBER CANCER INSTITUTE, INC., BOSTON, MA (US)

(21) Appl. No.: 11/910,144

(22) PCT Filed: Mar. 21, 2006
(86) PCT No.: PCT/US2006/011960

§ 371 Date: Jun. 17, 2008

Related U.S. Application Data
(60) Provisional application No. 60/667,922, filed on Mar. 31, 2005.

(51) Int. Cl. A01K 67/027; C12Q 1/68; G01N 33/53; C12N 15/63; C12N 5/00

(52) U.S. Cl. 800/18; 435/6; 435/7.1; 435/320.1; 435/325

(57) ABSTRACT

A material comprising a plurality of closed cells is provided, the space within each cell being substantially evacuated. This may be achieved by sealing a dimpled film to a sealing film in a vacuum so that each dimple is closed while under vacuum to form an evacuated closed cell.

### CROSS-REFERENCE TO RELATED APPLICATIONS

[0001] This application claims the benefit of priority to U.S. Provisional Application No. 60/667,922, filed on Mar. 31, 2005, the contents of which are hereby incorporated in their entirety.

### GOVERNMENT FUNDING

[0002] Work described herein was supported, at least in part, by the National Institutes of Health (NIH) under grant numbers 5KO8NS42737, 5K08CA82241, HD007466, P01CA95616, 1R01HG02341, and P2OCA96470. The government may have certain rights to this invention.

### BACKGROUND OF THE INVENTION

[0003] The vertebrate central nervous system (CNS) is comprised of three predominant cell types—neurons, oligodendrocytes and astrocytes—that arise from multipotent neural stem cells (NSCs). Recent studies have provided considerable insight into the development and diversity of neurons and the oligodendrocyte lineage (Shirasaki, R. & Pfaff, S. L. (2002) Annu Rev Neurosci 25, 251-81; Miller, R. H. (2002) Prog Neurobiol 67, 451-67). In contrast, there is a more limited molecular understanding of the development and diversity of the astrocyte lineage.

[0004] Historically, astrocytes have been viewed as a homogenous population of cells functioning to provide passive support by supply of essential substrates and removing toxic metabolites. This perceived limited functional range of the astrocyte is not consistent with the emerging data that these cells may retain stem cell like properties (Steindler, D. A. & Laywell, E. D. (2003) Glia 43, 62-9; Doetsch, F. (2003) Nat Neurosci 6, 1127-1134) and modulate almost every facet of functional neural networks (Fields, R. D. & Stevens-Graham, B. (2002) Science 298, 556-62; Newman, E. A. (2003) Trends Neurosci 26, 536-42). For instance, astrocytes may express voltage gated ion channels and neurotransmitter receptors that are co-activated at synapses and then participate in removing potentially toxic excitatory amino acids from synapses by high affinity transporters (Auld, D. S. & Robitaille, R. (2003) Neuron 40, 389-400). Astrocyte involvement in neuron homeostasis may also extend to trophic support (Song, H., Stevens, C. F. & Gage, F. H. (2002) Nature 417, 39-44), antioxidant functions, and production of critical substrates for neuron membrane synthesis. Dysregulation of these and other putative astrocyte functions have been variously implicated in the pathogenesis of numerous developmental, genetic, idiopathic and acquired neurodegenerative diseases (Nedergaard, M., et al. (2003) Trends Neurosci 26, 523-30).

[0005] To date, precise genetic analyses of the astrocyte in normal physiology and disease processes have been limited to in vitro studies utilizing specific glial differentiation model systems (Liu, Y., et al. (2002) Glia 40, 25-43; De Smet, C., et al. (2002) J Neurochem 81, 575-88; Geschwind, D. H., et al. (2001) Neuron 29, 325-39). These important efforts have focused on specialized aspects of early glial differentiation and as such have yielded limited information on the diverse roles of astrocytes in normal brain. However, the challenge remains to develop a comprehensive molecular profile of the astrocyte lineage that reflects its apparent developmental complexity, its full range of physiological capacities, its lineage heterogeneity as well as its role in the pathogenesis of numerous developmental, genetic, idiopathic and acquired neurological diseases, disorders, or conditions.

### SUMMARY OF THE INVENTION

[0006] The present invention is based, at least in part, on the identification of correlations between certain markers, e.g., nucleic acid markers and protein markers, involved in neural cell survival and neural cell homeostasis, e.g., markers differentially expressed in astrocytes, and in subjects suffering from neurological diseases, disorders, or conditions. The invention relates to compositions, kits, and methods for detecting, characterizing, preventing, and treating human neurological diseases, disorders, or conditions.

[0007] Accordingly, one aspect of the invention pertains to a method of assessing whether a subject is afflicted with a neurological disease, disorder or condition, the method comprising comparing: a) the amount and/or activity of at least one marker in a subject sample, wherein the at least one marker is selected from the group consisting of the markers listed in Table 2, and b) the normal amount and/or activity of at the least one marker in a control sample from a subject not afflicted with a neurological disease, disorder, or condition, wherein modulation of the amount and/or activity of the at least one marker in the subject sample compared to the normal amount and/or activity is an indication that the subject is afflicted with a neurological disease, disorder or condition. In one embodiment, the amount of at least one marker is compared. In another embodiment, the activity of at least one marker is compared. In yet another embodiment, the amount of at least one marker is determined by determining the level of expression of a marker. In another embodiment, the amount of at least one marker is determined by determining the copy number of the marker. In a further embodiment, the level of expression of the at least one marker is assessed by detecting the presence in the sample of a protein corresponding to the marker. In yet a further embodiment, the presence of the protein is detected using a reagent which specifically binds the protein, e.g., an antibody, an antibody derivative, or an antibody fragment. In one embodiment, the level of expression of the at least one marker in the sample is assessed by detecting the presence of a transcribed polynucleotide, e.g., an mRNA or a cDNA, or portion thereof, wherein the transcribed polynucleotide comprises the marker. In yet another embodiment, the step of detecting further comprises amplifying the transcribed polynucleotide. In one embodiment, the level of expression of the at least one marker in the sample is assessed by detecting the presence in the sample of a transcribed polynucleotide which anneals with the marker or anneals with a portion of a polynucleotide wherein the polynucleotide comprises the at least one marker, under stringent hybridization conditions. In one embodiment, the subject sample is selected from the group consisting of neuroglial tissue, whole blood, serum, plasma, buccal scrape, saliva, cerebrospinal fluid, spinal fluid, urine and stool. In another embodiment, the at least one marker is selected from the subset of markers in listed in Table 5 or Table 7.

[0008] Another aspect of the invention pertains to a method of assessing the efficacy of a test compound for treating or preventing a neurological disease, disorder or condition in a subject. The method comprises comparing: a) the amount and/or activity of at least one marker in a first sample obtained from the subject and maintained in the presence of the test compound, wherein the marker is selected from the group consisting of the markers listed in Table 2, and b) the amount and/or activity of the at least one marker in a second sample obtained from the subject and maintained in the absence of the test compound, wherein a modulation of the amount and/or activity of the at least one marker in the first sample from Table 2, as compared to the second sample, is an indication that the test compound is efficacious for treating or preventing a neurological disease, disorder or condition in the subject. In one embodiment, the first and second samples are portions of a single sample obtained from the subject. In another embodiment, the first and second samples are portions of pooled samples obtained from the subject. In one embodiment, the at least one marker is selected from the subset of markers listed in Table 5 or Table 7.

[0009] Another aspect of the invention features a method of assessing the efficacy of a therapy for treating or preventing a neurological disease, disorder or condition in a subject. The method comprises comparing: a) the amount and/or activity of at least one marker in a first sample obtained from the subject prior to administering at least a part of the therapy to the subject, wherein the marker is selected from the group consisting of the markers listed in Table 2, and b) the amount and/or activity of the at least one marker in a second sample obtained from the subject following the administration of at least a part of the therapy, wherein modulation of the amount and/or activity of the at least one marker in the first sample, as compared to the second sample, is an indication that the therapy is efficacious for treating or preventing a neurological disease, disorder or condition in the subject. In one embodiment, the at least one marker is selected from the subset of markers listed in Table 5 or Table 7.

[0010] In yet another aspect, the invention features a method of selecting a composition capable of modulating a symptom of a neurological disease, disorder or condition. The method comprises: a) providing a sample comprising an astrocyte; b) contacting said sample with a test compound; and c) determining the ability of the test compound to modulate the amount and/or activity of at least one marker, wherein the marker is selected from the group consisting of the markers listed in Table 2; thereby identifying a composition capable of modulating a symptom of a neurological disease, disorder or condition. In one embodiment, the astrocytes are isolated from an animal model of a neurological disease, disorder or condition. In another embodiment, the astrocytes are isolated from a neural cell line. In yet another embodiment, the astrocytes are isolated from a subject suffering from a neurological disease, disorder or condition. In one embodiment, the at least one marker is selected from the subset of markers listed in Table 5 or Table 7. In another embodiment, the method further comprises administering the test compound to an animal model of a neurological disease, disorder or condition.

[0011] In another aspect, the invention features a method of treating a subject afflicted with a neurological disease, disorder or condition. The method comprises administering to the subject a therapeutically effective amount of a compound which modulates the amount and/or activity of a gene or protein corresponding to at least one marker listed in Table 2, thereby treating a subject afflicted with a neurological disease, disorder or condition. Another aspect of the invention features a method for modulating neural homeostasis in a subject comprising administering to the subject a compound which modulates the amount and/or activity of a gene or protein corresponding to at least one marker listed in Table 2, thereby modulating neural homeostasis in a subject. Yet another aspect of the invention features a method of modulating neural cell survival in a subject comprising administering to the subject a compound which modulates the amount and/or activity of a gene or protein corresponding to at least one marker listed in Table 2, thereby modulating neural cell survival in said subject. In one embodiment, the compound is administered in a pharmaceutically acceptable formulation. In another embodiment, the compound is an antibody, an antibody derivative, or an antigen binding fragment thereof, which specifically binds to a protein corresponding to said marker. In a further embodiment, the antibody, antibody derivative, or antigen binding portion thereof, is conjugated to a toxin or a chemotherapeutic agent. In one embodiment, the compound is an RNA interfering agent, e.g., an siRNA or an shRNA molecule, which inhibits expression of a gene corresponding to said marker. In another embodiment, the compound is an antisense oligonucleotide complementary to a gene corresponding to said marker. In yet another embodiment, the compound is a peptide or peptidomimetic. In one embodiment, the compound is a small molecule which inhibits activity of said marker. In a further embodiment, the small molecule inhibits a protein-protein interaction between a marker and a target protein. In one embodiment, the compound is an aptamer which inhibits expression or activity of said marker. In another embodiment, the at least one marker is selected from the subset of markers listed in Table 5 or Table 7.

[0012] Another aspect of the invention features a kit for assessing the suitability of each of a plurality of compounds for treating or preventing a neurological disease, disorder or condition in a subject. The kit comprises: a) the plurality of compounds; and b) a reagent for assessing the amount and/or activity of at least one marker selected from the group consisting of the markers listed in Table 2. Yet another aspect of the invention features a kit for assessing whether a subject is afflicted with a neurological disease, disorder or condition. The kit comprises reagents for assessing the amount and/or activity of at least one marker selected from the group consisting of the markers listed in Table 2. In one embodiment, the at least one marker is selected from the subset of markers listed in Table 5 or Table 7.

[0013] One aspect of the invention features a method of making an isolated hybridoma which produces an antibody useful for assessing whether a subject is afflicted with a neurological disease, disorder or condition. The method comprises: isolating a protein corresponding to a marker selected from the group consisting of the markers listed in Table 2; immunizing a mammal using the isolated protein; isolating splenocytes from the immunized mammal; fusing the isolated splenocytes with an immortalized cell line to form hybridomas; and screening individual hybridomas for production of an antibody which specifically binds with the protein to isolate the hybridoma. Another aspect of the invention features an antibody produced by a hybridoma made by the foregoing method. In one embodiment, the at least one marker is selected from the subset of markers listed in Table 5 or Table 7.

[0014] In another aspect, the invention features a kit for assessing the presence in a sample of cells afflicted with a neurological disease, disorder or condition. The kit comprises an antibody, an antibody derivative, or fragment thereof, wherein the antibody, antibody derivative, or fragment thereof specifically binds with a protein corresponding to a marker selected from the group consisting of the markers listed in Table 2. Another aspect of the invention features a kit for assessing the presence in a sample of cells afflicted with a neurological disease, disorder or condition, the kit comprising a nucleic acid probe wherein the probe specifically binds with a transcribed polynucleotide, e.g., mRNA or cDNA, corresponding to a marker selected from the group consisting of the markers listed in Table 2. In one embodiment, the nucleic acid probe is a molecular beacon probe. In another embodiment, the at least one marker is selected from the subset of markers listed in Table 5 or Table 7.

[0015] Yet another aspect of the invention features a recombinant vector comprising an astrocyte-specific promoter operably linked to a Cre recombinase. In one embodiment, the vector further comprises an inducible fusion protein. In one embodiment, the inducible fusion protein comprises the estrogen receptor (ERT2). In another embodiment, the inducible fusion protein is induced by tamoxifen.

[0016] Another aspect of the invention features a cell or cell line comprising the recombinant vectors of the invention. Yet another aspect of the invention features a non-human animal containing the recombinant vectors of the invention.

[0017] One aspect of the invention features a recombinant vector comprising an astrocyte-specific promoter operably linked to sites of inducible recombination that flank a reporter sequence. In one embodiment, the reporter sequence comprises LacZ. In another embodiment, the reporter sequence comprises GFP. In yet another embodiment, the reporter sequence comprises EGFP. In a further embodiment, the sites of inducible recombination are lox sites. In yet a further embodiment, the sites of inducible recombination are loxP sites.

[0018] Another aspect of the invention features a recombinant vector comprising a astrocyte-specific promoter operably linked to an inducible fusion protein, and operably linked to a nucleotide sequence containing at least one exon of the EGFR gene.

[0019] Yet another aspect of the invention features a method of identifying the presence of astrocytes in a cell sample comprising determining the amount and/or activity of at least one marker in Table 2, to thereby identify the presence of astrocytes in the cell sample. In one embodiment, the at least one marker is selected from the subset of markers listed in Table 5 or Table 7.

### BRIEF DESCRIPTION OF THE DRAWINGS

[0020] FIG. 1 depicts the experimental strategy to identify the astrocyte transcriptome. Embryonic neural stem cells (NSCs) were differentiated into astrocytes by exposure to either serum (from 24 hours to 5 days), or CNTF, BMP2, or PACAP for 5 days. Primary cortical astrocyte cultures were isolated from postnatal mice (P1-2). Pure neuronal cultures were derived from embryonic E13.5 hippocampus. In addition, the gray matter, corpus callosum and glial limitans were microdissected from coronal sections of the telencephalon of postnatal (P0, P2, P5, P10) and adult mice. RNA was isolated from all of the above samples and was hybridized to the Affymetrix U74 oligonucleotide micro-arrays. The arrays were analyzed by D-chip software. Differentially expressed genes were analyzed by (i) unsupervised hierarchical clustering, (ii) R-SVM and (ii) threshold criteria. Genes differentially expressed by neurons (>3LBFC) were subtracted from the data. Candidate astrocyte genes were validated by RNA in situ hybridization (ISH) combined with immunohistochemistry (IHC). Finally, a novel clustering algorithm was used to identify additional astrocyte specific genes that ‘tightly cluster’ with the validated astrocyte genes

[0021] FIGS. 2A-2B depict the identification of astrocyte-specific candidate genes by UHC and R-SVM. (A) UHC analysis divided the experimental samples into two distinct groups that cluster on separate branches of the dendrogram. With all of the astrocyte samples clustered together, the short vertical distance between the astrocyte samples in the dendrogram indicated statistical similarity between the cortical astrocyte samples and the various differentiated astrocytes. Similarly, the CC, WM and GL cluster together suggesting a common transcriptional signal. The NSC, the embryonic (E13.5) cortex and neuronal lineage committed cells clustered together. The expression level matrix is shown representing standardized values from −3 (light gray, below the mean) to 3 (dark gray, above the mean). The mean (0 value) is represented by the white color. Rows correspond to different genes, and the columns represent the various experimental samples. When all in vitro and in vivo experimental samples were used, UHC generated a large cluster of 393 genes, which are strongly expressed among the in vitro astrocyte samples. Although GFAP is among this group of astrocyte-associated genes, there is no obvious GFAP sub cluster. (B) R-SVM, a novel class prediction tool, identified a subset of 85 genes, which contribute most to distinguishing astrocytes from undifferentiated or early lineage committed cells. The majority (53%) of the astrocyte candidate genes were from only in vitro astrocyte experimental samples, the remainder were differentially expressed both in cultured astrocytes and among the brain subregions. Regions of overlap indicate genes which were differentially expressed in both experimental samples.

[0022] FIGS. 3A-3C depict astrocytic candidate gene validation. (A). Candidate astrocyte genes with ‘glial’ expression based on similarity to the reference gene expression patterns for GFAP ISH and/or GFAP IHC were chosen for further validation. Note marked abundance of GFAP RNA in glia limitans (gl) and corpus callosum (cc) (arrowheads) and relative absence in cortical gray matter (cx). (B). The majority of validated genes showed a broad ‘pan-astrocytic’ pattern of expression in gray and white matter astrocytes (shown here, Clusterin (Clu), Apolipoprotein E (ApoE), Glutathione S-Transferase (GSTm), Aldolase 3 (Aldo3), and Cystatin 3 (Cst3); a subset of each which were GFAP positive. (C.) Several validated astrocyte genes showed a restricted expression pattern in subsets of astrocytes. Phospholipase A, group7 (Pla2g7) was predominantly expressed in cortical gray matter astrocytes while Aquaporin 4 (Aqp4) was highly abundant in glial limitans regions.

[0023] FIGS. 4A-4B depict tight cluster analysis and validated astrocyte specific genes which identifies additional astrocyte candidate genes. (A) Tight cluster analysis identified 4 tight clusters (shown in descending order of tightness, upper left) by inclusion of a total of 6 validated astrocyte genes across both astrocytes in cell culture and among the brain subregions but not in NSCs, neurons or embryonic brain. Two of these tight clusters are enlarged and shown with gene names, (top and bottom clusters have 28 and 51 genes, respectively). Validated genes are shown, top cluster 1 gene; bottom cluster 3 genes. (B) Similar tight cluster analysis using only the cell culture samples yield 9 clusters (shown on the left in descending order of tightness) identified by 16 in situ validated genes, the 3 enlarged clusters, with a total of 12, 26 and 40 genes, have 2, 2, and 6 validated astrocyte genes, respectively.

[0024] FIG. 5 illustrates that replicate samples within a given experimental modality or tissue type demonstrated a high degree of reproducibility (correlation coefficient 0.95-0.99) and when analyzed as groups, highlight the distinctiveness of the astrocyte profile from the profiles of neurons, NSCs and embryonic cortex.

[0025] FIGS. 6A-6F are graphs depicting the expression of astrocyte-specific genes in the brain and major organs from E13.5, P0, P5 and adult mice assessed by quantitative PCR.

### DETAILED DESCRIPTION OF THE INVENTION

[0026] The present invention is based, at least in part, on the molecular characterization of neuroglia, e.g., astrocytes. In particular, the present invention is based on the characterization of the astrocyte on the molecular level through transcriptional analysis of distinct astrocyte-rich cultures and CNS tissues using various bioinformatic approaches, as well as a validation scheme, to reveal distinctive patterns of expression.

[0027] The present invention provides newly discovered correlations between certain astrocyte-specific markers (e.g., nucleic acid markers and protein markers which are differentially expressed in astrocytes as compared to other brain cells), and neurological diseases, disorders, and conditions. Accordingly, methods are provided herein for utilizing the markers of the invention for detecting the presence of a neurological disease, disorder, or condition in a sample, the absence of a neurological disease, disorder or condition in a sample, and other characteristics of a neurological disease, disorder or condition that are relevant to prevention, diagnosis, characterization, and therapy of a neurological disease, disorder or condition in a subject.

[0028] In one embodiment, certain markers of the invention correlate with the grade of tumor, e.g., glioma, tumor prognosis, and treatment response of a tumor. Therefore, the present invention provides methods for diagnosing tumor grade, e.g., glioma grade, clinical outcome, and prognosis for a subject afflicted with a tumor, e.g., a glioma. For example, the markers of the present invention may be used to determine whether a tumor, e.g., a glioma, is a high grade tumor or a low grade tumor, to predict the responsiveness of a tumor to certain treatment regimens, and to determine the prognosis of a subject with a tumor, e.g., a glioma.

[0029] In another embodiment of the invention, nucleic acid molecules are provided which are useful for the construction of transgenic models of neurological diseases, disorders, and conditions, including animal models for cancer, e.g., brain tumor, e.g., glioma animal models.

[0030] Various aspects of the invention are described in further detail in the following subsections:

### I. DEFINITIONS

[0031] As used herein, each of the following terms has the meaning associated with it in this section.

[0032] The articles “a” and “an” are used herein to refer to one or to more than one (i.e. to at least one) of the grammatical object of the article. By way of example, “an element” means one element or more than one element.

[0033] As used herein, a “neuron” or “neural cell” is a cell that has two processes, e.g., axons and dendrites, and is capable of generating an action potential. Neurons have synapses that release and use neurotransmitters.

[0034] As used herein, “neuroglia” refers to the non-neuronal cellular elements of the central and peripheral nervous systems that have a resting potential. Neuroglia were formerly believed to be merely supporting cells but are now known to have important metabolic functions, since they are invariably interposed between neurons and the blood vessels supplying the nervous system. In central nervous tissue, neuroglia include astrocytes, oligodendroglia cells, ependymal cells, and microglia cells. The satellite cells of ganglia and the neurolemmal or Schwann cells around peripheral nerve fibers are the oligodendroglia cells of the peripheral nervous system.

[0035] As used herein, an “astrocyte” is a neuroglial cell which has a characteristic star-like shape and retains characteristics of neural stem cells (NSCs). An astrocyte is of ectodermal origin, and is characterized by fibrous, protoplasmic, or plasmatofibrous processes. Astrocytes provide physical and nutritional support for neurons, e.g., “neural homeostasis” and “neural cell survival” and, as such, play a modulatory role in various neurological diseases, disorders, and conditions. For example, an astrocyte is capable of performing one or more of the following functions which are necessary for neural cell survival and/or neural homeostasis: 1) removing brain debris; 2) transporting nutrients to neurons; 3) holding neurons in place; 4) digesting portions of dead neurons; 5) modulating neurotransmitter release; 6) producing substrates for neuron membrane synthesis; and 7) regulating the content of extracellular space, e.g., removing neurotransmitters.

[0036] As such, if any of these activities are disrupted, a neurological disease, disorder, or condition will develop. The term “neurological disease, disorder or condition” e.g., diseases, disorders and conditions of the central nervous system (CNS), is intended to be used in its broadest sense to include diseases, disorders or conditions, such as cognitive and neurodegenerative disorders, pain, and cancer or tumors of the central nervous system. Non-limiting examples of cognitive and neurodegenerative disorders include Alzheimer's disease, dementias related to Alzheimer's disease (such as Pick's disease), Parkinson's and other Lewy diffuse body diseases, senile dementia, Huntington's disease, Gilles de la Tourette's syndrome, musculoskeletal diseases, multiple sclerosis, amyotrophic lateral sclerosis, progressive supranuclear palsy, epilepsy, and Jakob-Creutzfieldt disease; autonomic function disorders such as hypertension and sleep disorders, and neuropsychiatric disorders, such as depression, schizophrenia, schizoaffective disorder, korsakoff's psychosis, mania, anxiety disorders, or phobic disorders; learning or memory disorders, e.g., amnesia or age-related memory loss, attention deficit disorder, dysthymic disorder, major depressive disorder, mania, obsessive-compulsive disorder, psychoactive substance use disorders, anxiety, phobias, panic disorder, as well as bipolar affective disorder, e.g., severe bipolar affective (mood) disorder (BP-1), and bipolar affective neurological disorders, e.g., migraine and obesity.

[0037] The term “pain” is defined herein based on the recommendation of International Association for the Study of Pain, as an unpleasant sensory and emotional experience associated with actual or potential tissue damage, or described in terms of such damage. Pain can be classified to include transient, acute and chronic pain. Acute and chronic pain are further categorized based on organ or tissue localization, whether it is malignant, e.g., having a cancerous origin, or nonmalignant. Furthermore, pain may be characterized as nociceptive, neuropathic or a combination thereof.

[0038] Non-limiting examples of pain that are contemplated by the invention include posttherapeutic neuralgia, posttherapeutic neuralgia, diabetic neuropathy, postmastectomy pain syndrome, stump pain, reflex sympathetic dystrophy, trigeminal neuralgia, neuropathic pain, orofacial neuropathic pain, diabetic neuropathy, causalgia, phantom limb pain, osteoarthritis, rheumatoid arthritis, pain associated with cancer, pain associated with HIV, fibromyalgia syndrome, tension myalgia, Guillian-Barre syndrome, Meralgia paraesthetica, burning mouth syndrome, fibrocitis, myofascial pain syndrome, idiopathic pain disorder, temporomandibular joint syndrome, atypical odontalgia, loin pain, haematuria syndrome, non-cardiac chest pain, low back pain, chronic nonspecific pain, psychogenic pain, musculoskeletal pain disorder, chronic pelvic pain, nonorganic chronic headache, tension-type headache, cluster headache, migraine and other conditions associated with chronic cephalic pain, complex regional pain syndrome, vaginismus, nerve trunk pain, somatoform pain disorder, cyclical mastalgia, chronic fatigue syndrome, multiple somatization syndrome, chronic pain disorder, somatization disorder, tabes dorsalis, spinal cord injury, central pain, posttherapeutic pain, noncardiac chest pain, irritable bowel syndrome, central post-stroke pain, Syndrome X, facial pain, idiopathic pain disorder, posttraumatic rheumatic pain modulation disorder (fibrositis syndrome), hyperalgesia, inflammatory pain and Tangier disease.

[0039] Non-limiting examples of cancers of the central nervous system include gliomas. As used herein, a “glioma” is a tumor of the central nervous system that develops from neuroglial cells and can develop as a primary brain tumor or a primary spinal cord tumor. Within the brain, gliomas usually occur in the cerebral hemispheres but may also affect other areas, especially the optic nerve, the brain stem and, particularly among children, the cerebellum. Gliomas are classified into several groups, such as, for example, astrocytomas, well-differentiated astrocytomas, anaplastic astrocytomas, and Glioblastoma Multiforme. Furthermore, under the current World Health Organization (WHO) grading system, gliomas are graded (I to IV) on the basis of a proliferative index and the presence or absence of neovascular proliferation.

[0040] Additional neurological diseases, disorders and conditions also contemplated by the present invention include ischemic disease, diabetic neuropathy, anti-cancer-agent-intoxicated neuropathy, retinal pigment degeneration, glaucoma, an anoxic episode, an injury to the brain and other parts of the CNS caused by trauma or other injury, a blow to the head, a spinal injury, a thromboembolic or hemorrhagic stroke, a cerebral vasospasm, hypoglycemia, cardiac arrest, cerebral ischemia or cerebral infarction, ischemic, hypoxic or anoxic brain damage, spinal cord injury, tissue ischemia and reperfusion injury. Further CNS-related disorders include, for example, those listed in the American Psychiatric Association's Diagnostic and Statistical manual of Mental Disorders (DSM), the most current version of which is incorporated herein by reference in its entirety.

[0041] A “marker”, e.g., an astrocyte-specific marker, e.g., a marker which is differentially expressed in astrocytes as compared to other brain cells, is a gene or protein that may be altered, wherein said alteration is associated with a neurological disease, disorder or condition, neural cell survival and/or neural cell homeostasis. The alteration may be in amount, structure, and/or activity in a neuroglial tissue or cell, e.g., an astrocyte, as compared to its amount, structure, and/or activity, in a normal or healthy tissue or cell (e.g., a control), and is associated with a disease state, such as a neurological disease, disorder or condition. For example, a marker of the invention which is associated with a neurological disease, disorder or condition may have altered copy number, expression level, protein level, protein activity, or methylation status, in a neuroglial tissue or cell as compared to a normal, healthy tissue or cell. Furthermore, a “marker” includes a molecule whose structure is altered, e.g., mutated (contains an allelic variant), e.g., differs from the wild type sequence at the nucleotide or amino acid level, e.g., by substitution, deletion, or addition, when present in a tissue or cell associated with a disease state, such as a neurological disease, disorder or condition.

[0042] The term “altered amount” or “modulated amount”, used interchangeably herein, of a marker, or “altered level” or “modulated level”, used interchangeably herein, of a marker refers to a modulated, e.g., increased or decreased, copy number of a marker or chromosomal region, and/or modulated, e.g., increased or decreased, expression level of a particular marker gene or genes in a neurological disease, disorder or condition sample, as compared to the expression level or copy number of the marker in a control sample. The term “altered amount” or “modulated amount” of a marker also includes a modulated, e.g., an increased or decreased, protein level of a marker in a sample, e.g., a neurological disease, disorder or condition sample, as compared to the protein level of the marker in a normal, control sample. Furthermore, an altered or modulated amount of a marker may be determined by detecting the methylation status of a marker, as described herein, which may affect the expression or activity of a marker.

[0043] The amount of a marker, e.g., expression or copy number of a marker, or protein level of a marker, in a subject is “significantly” higher or lower than the normal amount of a marker, if the amount of the marker is greater or less, respectively, than the normal level by an amount greater than the standard error of the assay employed to assess amount, and preferably at least twice, and more preferably three, four, five, ten or more times that amount. Alternately, the amount of the marker in the subject can be considered “significantly” higher or lower than the normal amount if the amount is at least about two, and preferably at least about three, four, or five times, higher or lower, respectively, than the normal amount of the marker.

[0044] The “copy number of a gene” or the “copy number of a marker” refers to the number of DNA sequences in a cell encoding a particular gene product. Generally, for a given gene, a mammal has two copies of each gene. The copy number can be increased, however, by gene amplification or duplication, or reduced by deletion.

[0045] The “normal” copy number of a marker or “normal” level of expression of a marker is the level of expression, copy number of the marker, in a biological sample, e.g., a sample containing tissue or cells, e.g., neuroglial tissue or cells, e.g., astrocytes, whole blood, serum, plasma, buccal scrape, saliva, spinal fluid, cerebrospinal fluid, urine, stool, from a subject, e.g. a human, not afflicted with a neurological disease, disorder or condition, e.g., a control sample.

[0046] The term “altered level of expression” used interchangeably herein with “modulated level of expression” of a marker refers to an expression level or copy number of a marker in a test sample e.g., a sample derived from a patient suffering from a neurological disease, disorder or condition, that is modulated, e.g., greater or less, than the standard error of the assay employed to assess expression or copy number, and is preferably at least twice, and more preferably three, four, five or ten or more times the expression level or copy number of the marker in a control sample (e.g., sample from a healthy subjects not having the associated neurological disease, disorder or condition) and preferably, the average expression level or copy number of the marker in several control samples. The altered level of expression is modulated, e.g., greater or less, than the standard error of the assay employed to assess expression or copy number, and is preferably at least twice, and more preferably three, four, five or ten or more times the expression level or copy number of the marker in a control sample (e.g., sample from a healthy subjects not having the associated a neurological disease, disorder or condition) and preferably, the average expression level or copy number of the marker in several control samples.

[0047] An “overexpression” or “significantly higher level of expression or copy number” of a marker refers to an expression level or copy number in a test sample that is greater than the standard error of the assay employed to assess expression or copy number, and is preferably at least twice, and more preferably three, four, five or ten or more times the expression level or copy number of the marker in a control sample (e.g., sample from a healthy subject not afflicted with a neurological disease, disorder or condition) and preferably, the average expression level or copy number of the marker in several control samples.

[0048] An “underexpression” or “significantly lower level of expression or copy number” of a marker refers to an expression level or copy number in a test sample that is greater than the standard error of the assay employed to assess expression or copy number, but is preferably at least twice, and more preferably three, four, five or ten or more times less than the expression level or copy number of the marker in a control sample (e.g., sample from a healthy subject not afflicted with a neurological disease, disorder or condition) and preferably, the average expression level or copy number of the marker in several control samples

[0049] “Methylation status” of a marker refers to the methylation pattern, e.g., methylation of the promoter of the marker, and/or methylation levels of the marker. DNA methylation is a heritable, reversible and epigenetic change. Yet, DNA methylation has the potential to alter gene expression, which has developmental and genetic consequences. DNA methylation has been linked to cancer, as described in, for example, Laird, et al. (1994) Human Molecular Genetics 3:1487-1495 and Laird, P. (2003) Nature 3:253-266, the contents of which are incorporated herein by reference. For example, methylation of CpG oligonucleotides in the promoters of tumor suppressor genes can lead to their inactivation. In addition, alterations in the normal methylation process are associated with genomic instability (Lengauer, et al. Proc. Natl. Acad. Sci. USA 94:2545-2550, 1997). Such abnormal epigenetic changes may be found in many types of cancer, e.g., gliomas, and can, therefore, serve as potential markers for oncogenic transformation. For example, see Costell, J. F. (2003) Front. Biosci. 8:s175-184.

[0050] Methods for determining methylation include restriction landmark genomic scanning (Kawai, et al., Mol. Cell. Biol. 14:7421-7427, 1994), methylation-sensitive arbitrarily primed PCR (Gonzalgo, et al., Cancer Res. 57:594-599, 1997); digestion of genomic DNA with methylation-sensitive restriction enzymes followed by Southern analysis of the regions of interest (digestion-Southern method); PCR-based process that involves digestion of genomic DNA with methylation-sensitive restriction enzymes prior to PCR amplification (Singer-Sam, et al., Nucl. Acids Res. 18:687, 1990); genomic sequencing using bisulfite treatment (Frommer, et al., Proc. Natl. Acad. Sci. USA 89:1827-1831, 1992); methylation-specific PCR (MSP) (Herman, et al. Proc. Natl. Acad. Sci. USA 93:9821-9826, 1992); and restriction enzyme digestion of PCR products amplified from bisulfite-converted DNA (Sadri and Hornsby Nucl. Acids Res. 24:5058-5059, 1996; and Xiong and Laird Nucl. Acids. Res. 25:2532-2534, 1997); PCR techniques for detection of gene mutations (Kuppuswamy, et al., Proc. Natl. Acad. Sci. USA 88:1143-1147, 1991) and quantitation of allelic-specific expression (Szabo and Mann Genes Dev. 9:3097-3108, 1995; and Singer-Sam, et al., PCR Methods Appl. 1: 160-163, 1992); and methods described in U.S. Pat. No. 6,251,594, the contents of which are incorporated herein by reference. An integrated genomic and epigenomic analysis as described in Zardo, et al. (2000) Nature Genetics 32:453-458, may also be used.

[0051] The term “altered activity” used interchangeably herein with “modulated activity” of a marker refers to an activity of a marker which is modulated, e.g., increased or decreased, in a disease state, e.g., in a neurological disease, disorder or condition sample, as compared to the activity of the marker in a normal, control sample. Altered or modulated activity of a marker may be the result of, for example, altered or modulated expression of the marker, altered or modulated protein level of the marker, altered or modulated structure of the marker, or, e.g., an altered or modulated interaction with other proteins involved in the same or different pathway as the marker, or altered or modulated interaction with transcriptional activators or inhibitors, or altered methylation status.

[0052] The term “altered structure” used interchangeably herein with “modulated structure” of a marker refers to the presence of mutations or allelic variants within the marker gene or maker protein, e.g., mutations which affect expression or activity of the marker, as compared to the normal or wild-type gene or protein. For example, mutations include, but are not limited to, substitutions, deletions, or addition mutations. Mutations may be present in the coding or non-coding region of the marker.

[0053] A “marker nucleic acid” is a nucleic acid (e.g., DNA, mRNA, cDNA) encoded by or corresponding to a marker of the invention. For example, such marker nucleic acid molecules include DNA (e.g., cDNA) comprising the entire or a partial sequence of any of the nucleic acid sequences of the genes set forth in Table 2 or the complement or hybridizing fragment of such a sequence. The marker nucleic acid molecules also include RNA comprising the entire or a partial sequence of any of the nucleic acid sequences of the genes set forth in Table 2 or the complement of such a sequence, wherein all thymidine residues are replaced with uridine residues. A “marker protein” is a protein encoded by or corresponding to a marker of the invention. A marker protein comprises the entire or a partial sequence of a protein encoded by any of the sequences of the genes set forth in Table 2 or a fragment thereof. The terms “protein” and “polypeptide” are used interchangeably herein.

[0054] Markers identified herein include diagnostic and therapeutic markers. A single marker may be a diagnostic marker, a therapeutic marker, or both a diagnostic and therapeutic marker.

[0055] As used herein, the term “therapeutic marker” includes markers, e.g., markers set forth in Table 2, which are believed to be involved in the development (including maintenance, progression, angiogenesis, and/or metastasis) of a neurological disease, disorder or condition. The neurological disease-, disorder-, or condition-related functions of a therapeutic marker may be confirmed by, e.g., increased or decreased copy number (by, e.g., fluorescence in situ hybridization (FISH) or quantitative PCR (qPCR)) or mutation (e.g., by sequencing), overexpression or underexpression (e.g., by in situ hybridization (ISH), Northern Blot, or qPCR), increased or decreased protein levels (e.g., by immunohistochemistry (IHC)), or increased or decreased protein activity (determined by, for example, modulation of a pathway in which the marker is involved), e.g., in more than about 5%, 6%, 7%, 8%, 9%, 10%, 11%, 12%, 13%, 14%, 15%, 20%, 25%, or more of human neurological diseases, disorders or conditions.

[0056] With respect to the functions of a therapeutic marker involved in a cancer, e.g., a tumor (such as a glioma), the function of such a marker may be confirmed by, e.g., (1) the inhibition of neuroglial cell proliferation and growth, e.g., in soft agar, by, e.g., RNA interference (“RNAi”) of the marker; (2) the ability of the marker to enhance transformation of mouse embryo fibroblasts (MEFs) by oncogenes, e.g., Myc and RAS, or by RAS alone; (3) the ability of the marker to enhance or decrease the growth of tumor cell lines, e.g., in soft agar; (4) the ability of the marker to transform primary mouse cells in SCID explant; and/or; (5) the prevention of maintenance or formation of tumors, e.g., tumors arising de novo in an animal or tumors derived from human cancer cell lines, by inhibiting or activating the marker. In one embodiment, a therapeutic marker may be used as a diagnostic marker.

[0057] As used herein, the term “diagnostic marker” includes markers, e.g., markers set forth in Table 2, which are useful in the diagnosis of a neurological disease, disorder or condition, e.g., over- or under-activity emergence, expression, growth, remission, recurrence or resistance of a neurological disease, disorder or condition (including a tumor) before, during or after therapy. The predictive functions of the marker may be confirmed by, e.g., (1) increased or decreased copy number (e.g., by FISH or qPCR), overexpression or underexpression (e.g., by ISH, Northern Blot, or qPCR), increased or decreased protein level (e.g., by IHC), or increased or decreased activity (determined by, for example, modulation of a pathway in which the marker is involved), e.g., in more than about 5%, 6%, 7%, 8%, 9%, 10%, 11%, 12%, 13%, 14%, 15%, 20%, 25%, or more of human neurological diseases, disorders or conditions; (2) its presence or absence in a biological sample, e.g., a sample containing tissue or cells, e.g., neuroglial tissue or cells, e.g., astrocytes, whole blood, serum, plasma, buccal scrape, saliva, spinal fluid, cerebrospinal fluid, urine, stool, from a subject, e.g. a human, afflicted with a neurological disease, disorder or condition; or (3) its presence or absence in clinical subset of patients with a neurological disease, disorder or condition (e.g., those responding to a particular therapy or those developing resistance).

[0058] A diagnostic marker of the invention includes a marker which is useful for the diagnosis of tumor grade, e.g., glioma grade, tumor prognosis, and treatment response of a tumor. Therefore, the present invention provides methods for diagnosing the grade of tumor (e.g., to determine whether a tumor is a high grade tumor or a low grade tumor), clinical outcome, and prognosis for a subject afflicted with a tumor, e.g., a glioma.

[0059] Diagnostic markers also include “surrogate markers,” e.g., markers which are indirect markers of a neurological disease, disorder or condition progression.

[0060] The term “probe” refers to any molecule which is capable of selectively binding to a specifically intended target molecule, for example a marker of the invention. Probes can be either synthesized by one skilled in the art, or derived from appropriate biological preparations. For purposes of detection of the target molecule, probes may be specifically designed to be labeled, as described herein. Examples of molecules that can be utilized as probes include, but are not limited to, RNA, DNA, proteins, antibodies, and organic monomers.

[0061] As used herein, the term “promoter”, “regulatory sequence”, or “promotor element” means a nucleic acid sequence which is required for expression of a gene product operably linked to the promoter/regulatory sequence. In some instances, this sequence may be the core promoter sequence and in other instances, this sequence may also include an enhancer sequence and other regulatory elements which are required for expression of the gene product. The promoter/regulatory sequence may, for example, be one which expresses the gene product in a spatially or temporally restricted manner.

[0062] An “RNA interfering agent” as used herein, is defined as any agent which interferes with or inhibits expression of a target gene, e.g., a marker of the invention, by RNA interference (RNAi). Such RNA interfering agents include, but are not limited to, nucleic acid molecules including RNA molecules which are homologous to the target gene, e.g., a marker of the invention, or a fragment thereof, short interfering RNA (siRNA), and small molecules which interfere with or inhibit expression of a target gene by RNA interference (RNAi).

[0063] “RNA interference (RNAi)” is an evolutionally conserved process whereby the expression or introduction of RNA of a sequence that is identical or highly similar to a target gene results in the sequence specific degradation or specific post-transcriptional gene silencing (PTGS) of messenger RNA (mRNA) transcribed from that targeted gene (see Coburn, G. and Cullen, B. (2002) J. of Virology 76(18):9225), thereby inhibiting expression of the target gene. In one embodiment, the RNA is double stranded RNA (dsRNA). This process has been described in plants, invertebrates, and mammalian cells. In nature, RNAi is initiated by the dsRNA-specific endonuclease Dicer, which promotes processive cleavage of long dsRNA into double-stranded fragments termed siRNAs. siRNAs are incorporated into a protein complex that recognizes and cleaves target mRNAs. RNAi can also be initiated by introducing nucleic acid molecules, e.g., synthetic siRNAs or RNA interfering agents, to inhibit or silence the expression of target genes. As used herein, “inhibition of target gene expression” or “inhibition of marker gene expression” includes any decrease in expression or protein activity or level of the target gene (e.g., a marker gene of the invention) or protein encoded by the target gene, e.g., a marker protein of the invention. The decrease may be of at least 30%, 40%, 50%, 60%, 70%, 80%, 90%, 95% or 99% or more as compared to the expression of a target gene or the activity or level of the protein encoded by a target gene which has not been targeted by an RNA interfering agent.

[0064] “Short interfering RNA” (siRNA), also referred to herein as “small interfering RNA” is defined as an agent which functions to inhibit expression of a target gene, e.g., by RNAi. An siRNA may be chemically synthesized, may be produced by in vitro transcription, or may be produced within a host cell. In one embodiment, siRNA is a double stranded RNA (dsRNA) molecule of about 15 to about 40 nucleotides in length, preferably about 15 to about 28 nucleotides, more preferably about 19 to about 25 nucleotides in length, and more preferably about 19, 20, 21, or 22 nucleotides in length, and may contain a 3′ and/or 5′ overhang on each strand having a length of about 0, 1, 2, 3, 4, or nucleotides. The length of the overhang is independent between the two strands, i.e., the length of the over hang on one strand is not dependent on the length of the overhang on the second strand. Preferably the siRNA is capable of promoting RNA interference through degradation or specific post-transcriptional gene silencing (PTGS) of the target messenger RNA (mRNA).

[0065] In another embodiment, an siRNA is a small hairpin (also called stem loop) RNA (shRNA). In one embodiment, these shRNAs are composed of a short (e.g., 19-25 nucleotide) antisense strand, followed by a 5-9 nucleotide loop, and the analogous sense strand. Alternatively, the sense strand may precede the nucleotide loop structure and the antisense strand may follow. These shRNAs may be contained in plasmids, retroviruses, and lentiviruses and expressed from, for example, the pol III U6 promoter, or another promoter (see, e.g., Stewart, et al. (2003) RNA April; 9(4):493-501 incorporated by reference herein).

[0066] RNA interfering agents, e.g., siRNA molecules, may be administered to a patient having or at risk for having of a neurological disease, disorder or condition, to modulate, e.g., inhibit, expression of a marker gene of the invention, e.g., a marker gene which is modulated, e.g., overexpressed, in a neurological disease, disorder or condition (e.g., a marker shown to be increased in a neurological disease, disorder or condition listed in Table 2) and thereby modulate, e.g., treat, prevent, or inhibit, a neurological disease, disorder or condition in the subject.

[0067] A “constitutive” promoter is a nucleotide sequence which, when operably linked with a polynucleotide which encodes or specifies a gene product, causes the gene product to be produced in a cell under most or all physiological conditions of the cell.

[0068] An “inducible” promoter is a nucleotide sequence which, when operably linked with a polynucleotide which encodes or specifies a gene product, causes the gene product to be produced in a cell substantially only when an inducer which corresponds to the promoter is present in the cell.

[0069] A “tissue-specific promoter”, “spatially-restricted promoter or regulatory sequence”, or “spatially restricted promotor element” is a nucleotide sequence which, when operably linked with a polynucleotide which encodes or specifies a gene product, causes the gene product to be produced in a cell substantially only if the cell is a cell of the tissue type corresponding to the promoter.

[0070] A “neuroglial specific promoter or regulatory sequence”” or “neuroglial restricted promotor element” is a nucleotide sequence which, when operably linked with a polynucleotide which encodes or specifies a gene product, causes the gene product to be produced only substantially in a neuroglial cell. An “astrocyte specific promoter” includes a promoter which, when operably linked with a polynucleotide which encodes or specifies a gene product, causes the gene product to be produced only substantially in astrocytes.

[0071] A “temporally-restricted promoter or regulatory sequence” or “temporally restricted promotor element” is a nucleotide sequence which, when operably linked with a polynucleotide which encodes or specifies a gene product, causes the gene product to be produced in a living human cell substantially only if the cell is at a particular developmental stage or is subjected to an agent which induces the expression of the promoter, e.g., tetracycline or tamoxifen.

[0072] A “transcribed polynucleotide” is a polynucleotide (e.g. an RNA, a cDNA, or an analog of one of an RNA or cDNA) which is complementary to or homologous with all or a portion of a mature RNA made by transcription of a marker of the invention and normal post-transcriptional processing (e.g. splicing), if any, of the transcript, and reverse transcription of the transcript.

[0073] “Complementary” refers to the broad concept of sequence complementarity between regions of two nucleic acid strands or between two regions of the same nucleic acid strand. It is known that an adenine residue of a first nucleic acid region is capable of forming specific hydrogen bonds (“base pairing”) with a residue of a second nucleic acid region which is antiparallel to the first region if the residue is thymine or uracil. Similarly, it is known that a cytosine residue of a first nucleic acid strand is capable of base pairing with a residue of a second nucleic acid strand which is antiparallel to the first strand if the residue is guanine. A first region of a nucleic acid is complementary to a second region of the same or a different nucleic acid if, when the two regions are arranged in an antiparallel fashion, at least one nucleotide residue of the first region is capable of base pairing with a residue of the second region. Preferably, the first region comprises a first portion and the second region comprises a second portion, whereby, when the first and second portions are arranged in an antiparallel fashion, at least about 50%, and preferably at least about 75%, at least about 90%, or at least about 95% of the nucleotide residues of the first portion are capable of base pairing with nucleotide residues in the second portion. More preferably, all nucleotide residues of the first portion are capable of base pairing with nucleotide residues in the second portion.

[0074] The terms “homology” or “identity,” as used interchangeably herein, refer to sequence similarity between two polynucleotide sequences or between two polypeptide sequences, with identity being a more strict comparison. The phrases “percent identity or homology” and “% identity or homology” refer to the percentage of sequence similarity found in a comparison of two or more polynucleotide sequences or two or more polypeptide sequences. “Sequence similarity” refers to the percent similarity in base pair sequence (as determined by any suitable method) between two or more polynucleotide sequences. Two or more sequences can be anywhere from 0-100% similar, or any integer value there between. Identity or similarity can be determined by comparing a position in each sequence that may be aligned for purposes of comparison. When a position in the compared sequence is occupied by the same nucleotide base or amino acid, then the molecules are identical at that position. A degree of similarity or identity between polynucleotide sequences is a function of the number of identical or matching nucleotides at positions shared by the polynucleotide sequences. A degree of identity of polypeptide sequences is a function of the number of identical amino acids at positions shared by the polypeptide sequences. A degree of homology or similarity of polypeptide sequences is a function of the number of amino acids at positions shared by the polypeptide sequences. The term “substantial homology,” as used herein, refers to homology of at least 50%, more preferably, 60%, 70%, 80%, 90%, 95% or more.

[0075] A marker is “fixed” to a substrate if it is covalently or non-covalently associated with the substrate such the substrate can be rinsed with a fluid (e.g. standard saline citrate, pH 7.4) without a substantial fraction of the marker dissociating from the substrate.

[0076] As used herein, a “naturally-occurring” nucleic acid molecule refers to an RNA or DNA molecule having a nucleotide sequence that occurs in nature (e.g. encodes a natural protein).

[0077] A neurological disease, disorder, or condition is “modulated”, e.g., “inhibited” if at least one symptom of the neurological disease, disorder, or condition is alleviated, terminated, slowed, or prevented. As used herein, a neurological disease, disorder, or condition is also “inhibited” if relapse, recurrence or metastasis of the neurological disease, disorder, or condition, e.g., a tumor, e.g., a glioma, is reduced, slowed, delayed, or prevented.

[0078] A kit is any manufacture (e.g. a package or container) comprising at least one reagent, e.g. a probe, for specifically detecting a marker of the invention, the manufacture being promoted, distributed, or sold as a unit for performing the methods of the present invention.

### II. USES OF THE INVENTION

[0079] The present invention is based, in part, on the identification of markers involved in neural cell survival and/or neural cell homeostasis, e.g., markers preferentially expressed in neuroglia, e.g., astrocytes, which have an altered amount, structure, and/or activity in cells afflicted with a neurological disease, disorder, or condition as compared to normal (i.e., non-afflicted or control) cells. The markers of the invention correspond to DNA, cDNA, RNA, and polypeptide molecules which can be detected in one or both of normal and afflicted cells.

[0080] The amount, structure, and/or activity, e.g., the presence, absence, copy number, expression level, protein level, protein activity, presence of mutations, e.g., mutations which affect activity of the marker (e.g., substitution, deletion, or addition mutations), and/or methylation status, of one or more of these markers in a sample, e.g., a sample containing tissue or cells, e.g., neuroglial tissue or cells, e.g., astrocytes, whole blood, serum, plasma, buccal scrape, saliva, spinal fluid, cerebrospinal fluid, urine, stool, is herein correlated with the disease state of the tissue. The invention thus provides compositions, kits, and methods for assessing the disease state of cells (e.g. cells obtained from a non-human, cultured non-human cells, and in vivo cells) as well as methods for treatment, prevention, and/or inhibition of a neurological disease, disorder or condition using a modulator, e.g., an agonist or antagonist, of a marker of the invention.

[0081] The compositions, kits, and methods of the invention have the following uses, among others:
[0082] 1) assessing whether a subject is afflicted with a neurological disease, disorder or condition;
[0083] 2) assessing the stage of a neurological disease, disorder or condition, e.g., a central nervous system tumor, in a human subject;
[0084] 3) assessing the grade of a tumor, e.g., a glioma, in a subject;
[0085] 4) assessing the benign or malignant nature of a tumor, e.g., a glioma, in a subject;
[0086] 5) assessing the metastatic potential of a tumor, e.g., a glioma, in a subject;
[0087] 6) assessing the histological type of a tumor, e.g., a glioma, in a subject;
[0088] 7) assessing the clinical outcome of a subject afflicted with a tumor, e.g., a glioma;
[0089] 8) predicting responsiveness of a subject afflicted with a tumor, e.g., a glioma, to treatment;
[0090] 9) identifying the appropriate treatment of a subject afflicted with a tumor, e.g., a glioma;
[0091] 10) making antibodies, antibody fragments or antibody derivatives that are useful for treating a neurological disease, disorder or condition and/or assessing whether a subject is afflicted with a neurological disease, disorder or condition;
[0092] 11) assessing the presence of neuroglia cells, e.g., astrocytes, in a sample;
[0093] 12) assessing the efficacy of one or more test compounds for inhibiting a neurological disease, disorder or condition in a subject;
[0094] 13) assessing the efficacy of a therapy for inhibiting a neurological disease, disorder or condition in a subject;
[0095] 14) monitoring the progression of a neurological disease, disorder or condition in a subject;
[0096] 15) selecting a composition or therapy for inhibiting a neurological disease, disorder or condition, e.g., in a subject;
[0097] 16) treating a subject afflicted with a neurological disease, disorder or condition;
[0098] 17) modulating, e.g., inhibiting, a neurological disease, disorder or condition in a subject;
[0099] 18) modulating neural homeostasis in a subject;
[0100] 19) modulating neural cell survival in a subject;
[0101] 20) assessing the carcinogenic potential of a test compound; and
[0102] 21) preventing the onset of a neurological disease, disorder or condition in a subject at risk for developing a neurological disease, disorder or condition.

[0103] The invention thus includes a method of assessing whether a subject is afflicted with a neurological disease, disorder or condition or is at risk for developing a neurological disease, disorder or condition. This method comprises comparing the amount, structure, and/or activity, e.g., the presence, absence, copy number, expression level, protein level, protein activity, presence of mutations, e.g., mutations which affect activity of the marker (e.g., substitution, deletion, or addition mutations), and/or methylation status, of a marker in a subject sample with the normal level. A significant difference between the amount, structure, or activity of the marker in the subject sample and the normal level is an indication that the subject is afflicted with a neurological disease, disorder or condition.

[0104] The marker is selected from the group consisting of the markers listed in Table 2. In one embodiment, the marker is selected from the markers listed in Table 5 or Table 7. Table 2 lists the markers which are differentially expressed in samples histologically identified as neuroglia, e.g., astrocytes. Table 2 also lists the Locus ID No, MGI Accession Number, Affymetrix probe-set accession number, and GenBank accession number for the nucleic acid sequence and the amino acid sequence of each of the markers. The amino acid sequence of the each of the markers listed in Table 2 is attached herewith as Appendix B. The nucleic acid sequence of the each of the markers listed in Table 2 is attached herewith as Appendix A. Table 5 and Table 7 list a subset of markers from Table 2 that are preferred markers with respect to the methods and compositions described herein. Although one or more molecules corresponding to the markers listed in Table 2, Table 5 and Table 7 may have been described by others, the significance of these markers with regard to astrocyte-specific expression and with regard to their significance in diagnosing, prognosing, characterizing, treating, and/or preventing a neurological disease, disorder, or condition, in a subject has not previously been identified.

[0105] Any marker or combination of markers listed in Table 2 may be used in the compositions, kits, and methods of the present invention. In general, it is preferable to use markers for which the difference between the amount, e.g., level of expression or copy number, and/or activity of the marker in cells afflicted with a neurological disease, disorder or condition, and the amount, e.g., level of expression or copy number, and/or activity of the same marker in normal cells, is as great as possible. Although this difference can be as small as the limit of detection of the method for assessing amount and/or activity of the marker, it is preferred that the difference be at least greater than the standard error of the assessment method, and preferably a difference of at least 2-, 3-, 4-, 5-, 6-, 7-, 8-, 9-, 10-, 15-, 20-, 25-, 100-, 500-, 1000-fold or greater than the amount, e.g., level of expression or copy number, and/or activity of the same marker in normal tissue.

[0106] It is understood that by routine screening of additional subject samples using one or more of the markers of the invention, it will be realized that certain of the markers have altered amount, structure, and/or activity in various neurological diseases, disorders or conditions, including tumors, e.g., gliomas. It is also understood that certain markers of the invention will be associated with high grade tumors, e.g., gliomas, and certain markers of the invention will be associated with low grade tumors, e.g., gliomas.

[0107] For example, it will be confirmed that some of the markers of the invention have altered amount, structure, and/or activity in some, i.e., 10%, 20%, 30%, or 40%, or most (i.e. 50% or more) or substantially all (i.e. 80% or more) neurological diseases, disorders, or conditions. Furthermore, certain of the markers of the invention are associated with a cancer or tumor of the central nervous system, of various histologic subtypes or grades.

[0108] In addition, as a greater number of subject samples are assessed for altered amount, structure, and/or activity of the markers or altered expression of the invention and the outcomes of the individual subjects from whom the samples were obtained are correlated, it will also be confirmed that markers have altered amount, structure, and/or activity of certain of the markers or altered expression of the invention are strongly correlated with a cancer or tumor of the central nervous system, e.g., a malignant tumor, and that altered expression of other markers of the invention are strongly correlated with a neurological disease, disorder, or condition, e.g., a cancer or tumor of the central nervous system, e.g., a benign tumor or premalignant state. The compositions, kits, and methods of the invention are thus useful for characterizing one or more of the stage, grade, histological type, and benign/premalignant/malignant nature of, e.g., a cancer or tumor, in a subject.

[0109] When the compositions, kits, and methods of the invention are used for characterizing one or more of the stage, grade, histological type, and benign/premalignant/malignant nature of a central nervous system tumor, in a subject, it is preferred that the marker or panel of markers of the invention be selected such that a positive result is obtained in at least about 20%, and preferably at least about 40%, 60%, or 80%, and more preferably, in substantially all, subjects afflicted with a central nervous system tumor, of the corresponding stage, grade, histological type, or benign/premalignant/malignant nature. Preferably, the marker or panel of markers of the invention is selected such that a PPV (positive predictive value) of greater than about 10% is obtained for the general population (more preferably coupled with an assay specificity greater than 99.5%).

[0110] When a plurality of markers of the invention are used in the compositions, kits, and methods of the invention, the amount, structure, and/or activity of each marker or level of expression or copy number can be compared with the normal amount, structure, and/or activity of each of the plurality of markers or level of expression or copy number, in non-afflicted, e.g., control, samples of the same type, either in a single reaction mixture (i.e. using reagents, such as different fluorescent probes, for each marker) or in individual reaction mixtures corresponding to one or more of the markers.

[0111] In one embodiment, a significantly altered or modulated amount, structure, and/or activity of more than one of the plurality of markers, in the sample, relative to the corresponding normal levels, is an indication that the subject is afflicted with a neurological disease, disorder or condition. For example, a significantly lower copy number in the sample of each of the plurality of markers, relative to the corresponding normal levels or copy number, is an indication that the subject is afflicted with a neurological disease, disorder or condition. In yet another embodiment, a significantly enhanced copy number of one or more markers and a significantly lower level of expression or copy number of one or more markers in a sample relative to the corresponding normal levels, is an indication that the subject is afflicted with a neurological disease, disorder or condition. Also, for example, a significantly enhanced copy number in the sample of each of the plurality of markers, relative to the corresponding normal copy number, is an indication that the subject is afflicted with a neurological disease, disorder or condition. In yet another embodiment, a significantly enhanced copy number of one or more markers and a significantly lower copy number of one or more markers in a sample relative to the corresponding normal levels, is an indication that the subject is afflicted with a neurological disease, disorder or condition.

[0112] When a plurality of markers are used, it is preferred that 2, 3, 4, 5, 8, 10, 12, 15, 20, 30, or 50 or more individual markers be used or identified, wherein fewer markers are preferred.

[0113] It is recognized that the compositions, kits, and methods of the invention will be of particular utility to subjects having an enhanced risk of developing a neurological disease, disorder or condition, and their medical advisors. Subjects recognized as having an enhanced risk of developing a neurological disease, disorder or condition, include, for example, subjects having a familial history of a neurological disease, disorder or condition, subjects identified as having a mutant oncogene (i.e. at least one allele), and subjects of advancing age.

[0114] A modulation, e.g., an alteration, e.g. copy number, amount, structure, and/or activity of a marker in normal (i.e. non-afflicted) human tissue can be assessed in a variety of ways. In one embodiment, the normal level of expression or copy number is assessed by assessing the level of expression and/or copy number of the marker in a portion of cells which appear to be non-afflicted and by comparing this normal level of expression or copy number with the level of expression or copy number in a portion of the cells which are suspected of being diseased or afflicted. For example, when a medical procedure reveals the presence of a tumor in one region of the CNS, the normal level of expression or copy number of a marker may be assessed using the non-affected portion of the CNS, and this normal level of expression or copy number may be compared with the level of expression or copy number of the same marker in an affected portion (i.e., the tumor) of the CNS. Alternately, and particularly as further information becomes available as a result of routine performance of the methods described herein, population-average values for “normal” copy number, amount, structure, and/or activity of the markers of the invention may be used. In other embodiments, the “normal” copy number, amount, structure, and/or activity of a marker may be determined by assessing copy number, amount, structure, and/or activity of the marker in a subject sample obtained from a non-neurological disease-, disorder- or condition-afflicted subject, from a subject sample obtained from a subject before the suspected onset of a neurological disease, disorder, or condition in the subject, from archived subject samples, and the like.

[0115] The invention includes compositions, kits, and methods for assessing the presence of neuroglial cells, e.g., astrocytes, in a sample (e.g. an archived tissue sample or a sample obtained from a subject). These compositions, kits, and methods are substantially the same as those described above, except that, where necessary, the compositions, kits, and methods are adapted for use with certain types of samples. For example, when the sample is a parafinized, archived human tissue sample, it may be necessary to adjust the ratio of compounds in the compositions of the invention, in the kits of the invention, or the methods used. Such methods are well known in the art and within the skill of the ordinary artisan.

[0116] The invention thus includes a kit for assessing the presence of neuroglial cells, e.g., astrocytes, (e.g. in a sample such as a subject sample) as well as a kit for assessing the amount or activity of a marker of the invention in a sample. The kit may comprise one or more reagents capable of identifying a marker of the invention, e.g., binding specifically with a nucleic acid or polypeptide corresponding to a marker of the invention. Suitable reagents for binding with a polypeptide corresponding to a marker of the invention include antibodies, antibody derivatives, antibody fragments, and the like. Suitable reagents for binding with a nucleic acid (e.g. a genomic DNA, an mRNA, a spliced mRNA, a cDNA, or the like) include complementary nucleic acids. For example, the nucleic acid reagents may include oligonucleotides (labeled or non-labeled) fixed to a substrate, labeled oligonucleotides not bound with a substrate, pairs of PCR primers, molecular beacon probes, and the like.

[0117] The kits of the invention may optionally comprise additional components useful for performing the methods of the invention. By way of example, the kit may comprise fluids (e.g., SSC buffer) suitable for annealing complementary nucleic acids or for binding an antibody with a protein with which it specifically binds, one or more sample compartments, an instructional material which describes performance of a method of the invention, a sample of normal cells, a sample of neuroglial cells, and the like.

[0118] A kit of the invention may comprise a reagent useful for determining protein level or protein activity of a marker. In another embodiment, a kit of the invention may comprise a reagent for determining methylation status of a marker, or may comprise a reagent for determining alteration of structure of a marker, e.g., the presence of a mutation.

[0119] The invention also includes a method of making an isolated hybridoma which produces an antibody useful in methods and kits of the present invention. A protein corresponding to a marker of the invention may be isolated (e.g., by purification from a cell in which it is expressed or by transcription and translation of a nucleic acid encoding the protein in vivo or in vitro using known methods) and a vertebrate, preferably a mammal such as a mouse, rat, rabbit, or sheep, is immunized using the isolated protein. The vertebrate may optionally (and preferably) be immunized at least one additional time with the isolated protein, so that the vertebrate exhibits a robust immune response to the protein. Splenocytes are isolated from the immunized vertebrate and fused with an immortalized cell line to form hybridomas, using any of a variety of methods well known in the art. Hybridomas formed in this manner are then screened using standard methods to identify one or more hybridomas which produce an antibody which specifically binds with the protein. The invention also includes hybridomas made by this method and antibodies made using such hybridomas.

[0120] The invention also includes a method of assessing the efficacy of a test compound for modulating, e.g., inhibiting, a neurological disease, disorder, or condition. As described above, differences in the amount, structure, and/or activity of the markers of the invention, or level of expression of the invention, or copy number, correlate with the afflicted state of cells. Although it is recognized that changes in the levels of amount, e.g., expression or copy number, structure, and/or activity of certain of the markers or expression or copy number of the invention likely result from the afflicted state of cells, it is likewise recognized that changes in the amount may induce, maintain, and promote the afflicted state. Thus, compounds which modulate, e.g., inhibit, a neurological disease, disorder, or condition, in a subject may cause a change, e.g., a change in expression and/or activity of one or more of the markers of the invention to a level nearer the normal level for that marker (e.g., the amount, e.g., expression, and/or activity for the marker in non-afflicted cells).

[0121] This method thus comprises comparing amount, e.g., expression, and/or activity of a marker in a first cell sample and maintained in the presence of the test compound and amount, e.g., expression, and/or activity of the marker in a second cell sample and maintained in the absence of the test compound. A significant modulation in the amount, e.g., expression, and/or activity of a marker, or a significant decrease in the amount, e.g., expression, and/or activity of a marker listed in Table 2, is an indication that the test compound modulates a neurological disease, disorder, or condition. The cell samples may, for example, be aliquots of a single sample of normal cells obtained from a subject, pooled samples of normal cells obtained from a subject, cells of a normal cell lines, aliquots of a single sample of afflicted cells obtained from a subject, pooled samples of afflicted cells obtained from a subject, cells of a neuroglial cell line, cells from an animal model of a neurological disease, disorder, or condition, or the like. In one embodiment, the samples are neuroglial cells obtained from a subject and a plurality of compounds known to be effective for modulating various neurological diseases, disorders, or conditions, are tested in order to identify the compound which is likely to best modulate the a neurological disease, disorder, or condition in the subject.

[0122] This method may likewise be used to assess the efficacy of a therapy, e.g., chemotherapy, radiation therapy, surgery, or any other therapeutic approach useful for modulating a neurological disease, disorder, or condition in a subject. In this method, the amount, e.g., expression, and/or activity of one or more markers of the invention in a pair of samples (one subjected to the therapy, the other not subjected to the therapy) is assessed. As with the method of assessing the efficacy of test compounds, if the therapy induces a significant modulation in the amount, e.g., expression, and/or activity of a marker listed in Table 2 then the therapy is efficacious for modulating a neurological disease, disorder, or condition. As above, if samples from a selected subject are used in this method, then alternative therapies can be assessed in vitro in order to select a therapy most likely to be efficacious for modulating a neurological disease, disorder, or condition in the subject.

[0123] This method may likewise be used to monitor the progression of a neurological disease, disorder, or condition in a subject, wherein if a sample in a subject has a significant modulation in the amount, e.g., expression, and/or activity of a marker listed in Table 2 during the progression of a neurological disease, disorder, or condition, e.g., at a first point in time and a subsequent point in time, then the neurological disease, disorder, or condition has been modulated, e.g., improved. In yet another embodiment, between the first point in time and a subsequent point in time, the subject has undergone treatment, e.g., chemotherapy, radiation therapy, surgery, or any other therapeutic approach useful for inhibiting a neurological disease, disorder, or condition, has completed treatment, or is in remission.

[0124] As described herein, a neurological disease, disorder, or condition in a subject is associated with a modulation in neural cell survival and/or neural homeostasis which is associated with modulation in the amount, e.g., expression, and/or activity of one or more markers listed in Table 2. While, as discussed above, some of these changes in amount, e.g., expression, and/or activity number result from occurrence of the neurological disease, disorder, or condition, others of these changes induce, maintain, and promote the disease state of afflicted cells. Thus, a neurological disease, disorder, or condition characterized by a modulation, e.g., an increase, in the amount, e.g., expression, and/or activity of one or more markers listed in Table 2 (e.g., a marker that was shown to be increased in a neurological disease, disorder, or condition), can be modulated, e.g., inhibited, by modulating, e.g., inhibiting, the amount, e.g., expression, and/or activity of those markers. Likewise, a neurological disease, disorder, or condition characterized by a modulation, e.g., a decrease, in the amount, e.g., expression, and/or activity of one or more markers listed in Table 2 (e.g., a marker that was shown to be decreased in neurological disease, disorder, or condition), can be modulated, e.g., enhanced, by modulating, e.g., enhancing, amount, e.g., expression, and/or activity of those markers.

[0125] Amount and/or activity of a marker listed in Table 2 (e.g., a marker that was shown to be modulated, e.g., increased, in a neurological disease, disorder, or condition), can be modulated e.g., decreased, in a number of ways generally known in the art. For example, an antisense oligonucleotide can be provided to the afflicted cells in order to inhibit transcription, translation, or both, of the marker(s). An RNA interfering agent, e.g., an siRNA molecule, which is targeted to a marker listed in Table 2, can be provided to the afflicted cells in order to inhibit expression of the target marker, e.g., through degradation or specific post-transcriptional gene silencing (PTGS) of the messenger RNA (mRNA) of the target marker. Alternately, a polynucleotide encoding an antibody, an antibody derivative, or an antibody fragment, e.g., a fragment capable of binding an antigen, and operably linked with an appropriate promoter or regulator region, can be provided to the cell in order to generate intracellular antibodies which will inhibit the function, amount, and/or activity of the protein corresponding to the marker(s). Conjugated antibodies or fragments thereof, e.g., chemolabeled antibodies, radiolabeled antibodies, or immunotoxins targeting a marker of the invention may also be administered to treat, prevent or inhibit a neurological disease, disorder, or condition.

[0126] A small molecule may also be used to modulate expression and/or activity of a marker listed in Table 2. In one embodiment, a small molecule functions to disrupt a protein-protein interaction between a marker of the invention and a target molecule or ligand, thereby modulating, e.g., increasing or decreasing, the activity of the marker.

[0127] Using the methods described herein, a variety of molecules, particularly including molecules sufficiently small that they are able to cross the cell membrane, can be screened in order to identify molecules which modulate, e.g., inhibit, the amount and/or activity of the marker(s). The compound so identified can be provided to the subject in order to modulate, e.g., inhibit, the amount and/or activity of the marker(s) in the afflicted cells of the subject.

[0128] Amount and/or activity of a marker listed in Table 2 (e.g., a marker that was shown to be decreased in a neurological disease, disorder, or condition) can be modulated, e.g., enhanced, in a number of ways generally known in the art. For example, a polynucleotide encoding the marker and operably linked with an appropriate promoter/regulator region can be provided to cells of the subject in order to induce enhanced expression and/or activity of the protein (and mRNA) corresponding to the marker therein. Alternatively, if the protein is capable of crossing the cell membrane, inserting itself in the cell membrane, or is normally a secreted protein, then amount and/or activity of the protein can be enhanced by providing the protein (e.g. directly or by way of the bloodstream) to afflicted cells in the subject. A small molecule may also be used to modulate, e.g., increase, expression or activity of a marker listed in Table 2 (e.g., a marker that was shown to be decreased in a neurological disease, disorder, or condition). Furthermore, in another embodiment, a modulator of a marker of the invention, e.g., a small molecule, may be used, for example, to re-express a silenced gene, e.g., a tumor suppressor, in order to treat or prevent a neurological disease, disorder, or condition, e.g., a central nervous system tumor. For example, such a modulator may interfere with a DNA binding element or a methyltransferase.

[0129] As described above, neural cell survival and neural cell homeostasis and the afflicted state of human cells is correlated with changes in the amount and/or activity of the markers of the invention. Thus, compounds which induce increased expression or activity of one or more of the markers listed in Table 2 (e.g., a marker that was shown to be increased in a neurological disease, disorder, or condition), decreased amount and/or activity of one or more of the markers listed in Table 2 (e.g., a marker that was shown to be decreased in neurological disease, disorder, or condition), can induce cell carcinogenesis or a neurological disease, disorder or condition. The invention also includes a method for assessing the human cell carcinogenic potential of a test compound. This method comprises maintaining separate aliquots of human cells in the presence and absence of the test compound. Expression or activity of a marker of the invention in each of the aliquots is compared. A significant modulation, e.g., a significant increase, in the amount and/or activity of a marker listed in Table 2 (e.g., a marker that was shown to be increased in a neurological disease, disorder, or condition), or a significant modulation, e.g., a significant decrease in the amount and/or activity of a marker listed in Table 2 (e.g., a marker that was shown to be decreased in a neurological disease, disorder, or condition), in the aliquot maintained in the presence of the test compound (relative to the aliquot maintained in the absence of the test compound) is an indication that the test compound possesses human cell carcinogenic potential or the ability to induce a neurological disease, disorder or condition. The relative disease causing potential of various test compounds can be assessed by comparing the degree of enhancement or inhibition of the amount and/or activity of the relevant markers, by comparing the number of markers for which the amount and/or activity is modulated, e.g., enhanced or inhibited, or by comparing both.

### III. ISOLATED NUCLEIC ACID MOLECULES

[0130] One aspect of the invention pertains to nucleic acid molecules that correspond to a marker of the invention, including nucleic acids which encode a polypeptide corresponding to a marker of the invention or a portion of such a polypeptide. Nucleic acid molecules of the invention also include nucleic acid molecules sufficient for use as hybridization probes to identify nucleic acid molecules that correspond to a marker of the invention, including nucleic acid molecules which encode a polypeptide corresponding to a marker of the invention, and fragments of such nucleic acid molecules, e.g., those suitable for use as PCR primers for the amplification or mutation of nucleic acid molecules. As used herein, the term “nucleic acid molecule” is intended to include DNA molecules (e.g., cDNA or genomic DNA) and RNA molecules (e.g., mRNA) and analogs of the DNA or RNA generated using nucleotide analogs. The nucleic acid molecule can be single-stranded or double-stranded, but preferably is double-stranded DNA.

[0131] In one embodiment, a nucleic acid molecule of the invention is an isolated nucleic acid molecule. An “isolated” nucleic acid molecule is one which is separated from other nucleic acid molecules which are present in the natural source of the nucleic acid molecule. Preferably, an “isolated” nucleic acid molecule is free of sequences (preferably protein-encoding sequences) which naturally flank the nucleic acid (i.e., sequences located at the 5′ and 3′ ends of the nucleic acid) in the genomic DNA of the organism from which the nucleic acid is derived. For example, in various embodiments, the isolated nucleic acid molecule can contain less than about 5 kB, 4 kB, 3 kB, 2 kB, 1 kB, 0.5 kB or 0.1 kB of nucleotide sequences which naturally flank the nucleic acid molecule in genomic DNA of the cell from which the nucleic acid is derived. Moreover, an “isolated” nucleic acid molecule, such as a cDNA molecule, can be substantially free of other cellular material or culture medium when produced by recombinant techniques, or substantially free of chemical precursors or other chemicals when chemically synthesized.

[0132] A nucleic acid molecule of the present invention, e.g., a nucleic acid molecule encoding a protein corresponding to a marker listed in Table 2, can be isolated using standard molecular biology techniques and the sequence information in the database records described herein. Using all or a portion of such nucleic acid sequences, nucleic acid molecules of the invention can be isolated using standard hybridization and cloning techniques (e.g., as described in Sambrook et al., ed., Molecular Cloning: A Laboratory Manual, 2nd ed., Cold Spring Harbor Laboratory Press, Cold Spring Harbor, N.Y., 1989).

[0133] A nucleic acid molecule of the invention can be amplified using cDNA, mRNA, or genomic DNA as a template and appropriate oligonucleotide primers according to standard PCR amplification techniques. The nucleic acid molecules so amplified can be cloned into an appropriate vector and characterized by DNA sequence analysis. Furthermore, oligonucleotides corresponding to all or a portion of a nucleic acid molecule of the invention can be prepared by standard synthetic techniques, e.g., using an automated DNA synthesizer.

[0134] In another preferred embodiment, a nucleic acid molecule of the invention comprises a nucleic acid molecule which has a nucleotide sequence complementary to the nucleotide sequence of a nucleic acid corresponding to a marker of the invention or to the nucleotide sequence of a nucleic acid encoding a protein which corresponds to a marker of the invention. A nucleic acid molecule which is complementary to a given nucleotide sequence is one which is sufficiently complementary to the given nucleotide sequence that it can hybridize to the given nucleotide sequence thereby forming a stable duplex.

[0135] Moreover, a nucleic acid molecule of the invention can comprise only a portion of a nucleic acid sequence, wherein the full length nucleic acid sequence comprises a marker of the invention or which encodes a polypeptide corresponding to a marker of the invention. Such nucleic acid molecules can be used, for example, as a probe or primer. The probe/primer typically is used as one or more substantially purified oligonucleotides. The oligonucleotide typically comprises a region of nucleotide sequence that hybridizes under stringent conditions to at least about 7, preferably about 15, more preferably about 25, 50, 75, 100, 125, 150, 175, 200, 250, 300, 350, or 400 or more consecutive nucleotides of a nucleic acid of the invention.

[0136] Probes based on the sequence of a nucleic acid molecule of the invention can be used to detect transcripts or genomic sequences corresponding to one or more markers of the invention. The probe comprises a label group attached thereto, e.g., a radioisotope, a fluorescent compound, an enzyme, or an enzyme co-factor. Such probes can be used as part of a diagnostic test kit for identifying cells or tissues which mis-express the protein, such as by measuring levels of a nucleic acid molecule encoding the protein in a sample of cells from a subject, e.g., detecting mRNA levels or determining whether a gene encoding the protein has been mutated or deleted.

[0137] The invention further encompasses nucleic acid molecules that differ, due to degeneracy of the genetic code, from the nucleotide sequence of nucleic acid molecules encoding a protein which corresponds to a marker of the invention, and thus encode the same protein.

[0138] In addition to the nucleotide sequences described in Table 2, it will be appreciated by those skilled in the art that DNA sequence polymorphisms that lead to changes in the amino acid sequence can exist within a population (e.g., the human population). Such genetic polymorphisms can exist among individuals within a population due to natural allelic variation. An allele is one of a group of genes which occur alternatively at a given genetic locus. In addition, it will be appreciated that DNA polymorphisms that affect RNA expression levels can also exist that may affect the overall expression level of that gene (e.g., by affecting regulation or degradation).

[0139] As used herein, the phrase “allelic variant” refers to a nucleotide sequence which occurs at a given locus or to a polypeptide encoded by the nucleotide sequence.

[0140] As used herein, the terms “gene” and “recombinant gene” refer to nucleic acid molecules comprising an open reading frame encoding a polypeptide corresponding to a marker of the invention. Such natural allelic variations can typically result in 1-5% variance in the nucleotide sequence of a given gene. Alternative alleles can be identified by sequencing the gene of interest in a number of different individuals. This can be readily carried out by using hybridization probes to identify the same genetic locus in a variety of individuals. Any and all such nucleotide variations and resulting amino acid polymorphisms or variations that are the result of natural allelic variation and that do not alter the functional activity are intended to be within the scope of the invention.

[0141] In another embodiment, a nucleic acid molecule of the invention is at least 7, 15, 20, 25, 30, 40, 60, 80, 100, 150, 200, 250, 300, 350, 400, 450, 550, 650, 700, 800, 900, 1000, 1200, 1400, 1600, 1800, 2000, 2200, 2400, 2600, 2800, 3000, 3500, 4000, 4500, or more nucleotides in length and hybridizes under stringent conditions to a nucleic acid molecule corresponding to a marker of the invention or to a nucleic acid molecule encoding a protein corresponding to a marker of the invention. As used herein, the term “hybridizes under stringent conditions” is intended to describe conditions for hybridization and washing under which nucleotide sequences at least 60% (65%, 70%, preferably 75%) identical to each other typically remain hybridized to each other. Such stringent conditions are known to those skilled in the art and can be found in sections 6.3.1-6.3.6 of Current Protocols in Molecular Biology, John Wiley & Sons, N.Y. (1989). A preferred, non-limiting example of stringent hybridization conditions are hybridization in 6× sodium chloride/sodium citrate (SSC) at about 45° C., followed by one or more washes in 0.2×SSC, 0.1% SDS at 50-65° C.

[0142] In addition to naturally-occurring allelic variants of a nucleic acid molecule of the invention that can exist in the population, the skilled artisan will further appreciate that sequence changes can be introduced by mutation thereby leading to changes in the amino acid sequence of the encoded protein, without altering the biological activity of the protein encoded thereby. For example, one can make nucleotide substitutions leading to amino acid substitutions at “non-essential” amino acid residues. A “non-essential” amino acid residue is a residue that can be altered from the wild-type sequence without altering the biological activity, whereas an “essential” amino acid residue is required for biological activity. For example, amino acid residues that are not conserved or only semi-conserved among homologs of various species may be non-essential for activity and thus would be likely targets for alteration. Alternatively, amino acid residues that are conserved among the homologs of various species (e.g., murine and human) may be essential for activity and thus would not be likely targets for alteration.

[0143] Accordingly, another aspect of the invention pertains to nucleic acid molecules encoding a polypeptide of the invention that contain changes in amino acid residues that are not essential for activity. Such polypeptides differ in amino acid sequence from the naturally-occurring proteins which correspond to the markers of the invention, yet retain biological activity. In one embodiment, such a protein has an amino acid sequence that is at least about 40% identical, 50%, 60%, 70%, 80%, 90%, 95%, or 98% identical to the amino acid sequence of one of the proteins which correspond to the markers of the invention.

[0144] A nucleic acid molecule encoding a variant protein can be created by introducing one or more nucleotide substitutions, additions or deletions into the nucleotide sequence of nucleic acids of the invention, such that one or more amino acid residue substitutions, additions, or deletions are introduced into the encoded protein. Mutations can be introduced by standard techniques, such as site-directed mutagenesis and PCR-mediated mutagenesis. Preferably, conservative amino acid substitutions are made at one or more predicted non-essential amino acid residues. A “conservative amino acid substitution” is one in which the amino acid residue is replaced with an amino acid residue having a similar side chain. Families of amino acid residues having similar side chains have been defined in the art. These families include amino acids with basic side chains (e.g., lysine, arginine, histidine), acidic side chains (e.g., aspartic acid, glutamic acid), uncharged polar side chains (e.g., glycine, asparagine, glutamine, serine, threonine, tyrosine, cysteine), non-polar side chains (e.g., alanine, valine, leucine, isoleucine, proline, phenylalanine, methionine, tryptophan), beta-branched side chains (e.g., threonine, valine, isoleucine) and aromatic side chains (e.g., tyrosine, phenylalanine, tryptophan, histidine). Alternatively, mutations can be introduced randomly along all or part of the coding sequence, such as by saturation mutagenesis, and the resultant mutants can be screened for biological activity to identify mutants that retain activity. Following mutagenesis, the encoded protein can be expressed recombinantly and the activity of the protein can be determined.

[0145] The present invention encompasses antisense nucleic acid molecules, i.e., molecules which are complementary to a sense nucleic acid of the invention, e.g., complementary to the coding strand of a double-stranded cDNA molecule corresponding to a marker of the invention or complementary to an mRNA sequence corresponding to a marker of the invention. Accordingly, an antisense nucleic acid molecule of the invention can hydrogen bond to (i.e. anneal with) a sense nucleic acid of the invention. The antisense nucleic acid can be complementary to an entire coding strand, or to only a portion thereof, e.g., all or part of the protein coding region (or open reading frame). An antisense nucleic acid molecule can also be antisense to all or part of a non-coding region of the coding strand of a nucleotide sequence encoding a polypeptide of the invention. The non-coding regions (“5′ and 3′ untranslated regions”) are the 5′ and 3′ sequences which flank the coding region and are not translated into amino acids.

[0146] An antisense oligonucleotide can be, for example, about 5, 10, 15, 20, 25, 30, 35, 40, 45, or 50 or more nucleotides in length. An antisense nucleic acid of the invention can be constructed using chemical synthesis and enzymatic ligation reactions using procedures known in the art. For example, an antisense nucleic acid (e.g., an antisense oligonucleotide) can be chemically synthesized using naturally occurring nucleotides or variously modified nucleotides designed to increase the biological stability of the molecules or to increase the physical stability of the duplex formed between the antisense and sense nucleic acids, e.g., phosphorothioate derivatives and acridine substituted nucleotides can be used. Examples of modified nucleotides which can be used to generate the antisense nucleic acid include 5-fluorouracil, 5-bromouracil, 5-chlorouracil, 5-iodouracil, hypoxanthine, xanthine, 4-acetylcytosine, 5-(carboxyhydroxylmethyl) uracil, 5-carboxymethylaminomethyl-2-thiouridine, 5-carboxymethylaminomethyluracil, dihydrouracil, beta-D-galactosylqueosine, inosine, N6-isopentenyladenine, 1-methylguanine, 1-methylinosine, 2,2-dimethylguanine, 2-methyladenine, 2-methylguanine, 3-methylcytosine, 5-methylcytosine, N6-adenine, 7-methylguanine, 5-methylaminomethyluracil, 5-methoxyaminomethyl-2-thiouracil, beta-D-mannosylqueosine, 5′-methoxycarboxymethyluracil, 5-methoxyuracil, 2-methylthio-N6-isopentenyladenine, uracil-5-oxyacetic acid (v), wybutoxosine, pseudouracil, queosine, 2-thiocytosine, 5-methyl-2-thiouracil, 2-thiouracil, 4-thiouracil, 5-methyluracil, uracil-5-oxyacetic acid methylester, uracil-5-oxyacetic acid (v), 5-methyl-2-thiouracil, 3-(3-amino-3-N-2-carboxypropyl) uracil, (acp3)w, and 2,6-diaminopurine. Alternatively, the antisense nucleic acid can be produced biologically using an expression vector into which a nucleic acid has been sub-cloned in an antisense orientation (i.e., RNA transcribed from the inserted nucleic acid will be of an antisense orientation to a target nucleic acid of interest, described further in the following subsection).

[0147] The antisense nucleic acid molecules of the invention are typically administered to a subject or generated in situ such that they hybridize with or bind to cellular mRNA and/or genomic DNA encoding a polypeptide corresponding to a selected marker of the invention to thereby inhibit expression of the marker, e.g., by inhibiting transcription and/or translation. The hybridization can be by conventional nucleotide complementarity to form a stable duplex, or, for example, in the case of an antisense nucleic acid molecule which binds to DNA duplexes, through specific interactions in the major groove of the double helix. Examples of a route of administration of antisense nucleic acid molecules of the invention include direct injection at a tissue site or infusion of the antisense nucleic acid into an appropriately-associated body fluid, e.g., cerebrospinal fluid. Alternatively, antisense nucleic acid molecules can be modified to target selected cells and then administered systemically. For example, for systemic administration, antisense molecules can be modified such that they specifically bind to receptors or antigens expressed on a selected cell surface, e.g., by linking the antisense nucleic acid molecules to peptides or antibodies which bind to cell surface receptors or antigens. The antisense nucleic acid molecules can also be delivered to cells using the vectors described herein. To achieve sufficient intracellular concentrations of the antisense molecules, vector constructs in which the antisense nucleic acid molecule is placed under the control of a strong pol II or pol III promoter are preferred.

[0148] An antisense nucleic acid molecule of the invention can be an α-anomeric nucleic acid molecule. An α-anomeric nucleic acid molecule forms specific double-stranded hybrids with complementary RNA in which, contrary to the usual α-units, the strands run parallel to each other (Gaultier et al., 1987, Nucleic Acids Res. 15:6625-6641). The antisense nucleic acid molecule can also comprise a 2′-o-methylribonucleotide (Inoue et al., 1987, Nucleic Acids Res. 15:6131-6148) or a chimeric RNA-DNA analogue (Inoue et al., 1987, FEBS Lett. 215:327-330).

[0149] The invention also encompasses ribozymes. Ribozymes are catalytic RNA molecules with ribonuclease activity which are capable of cleaving a single-stranded nucleic acid, such as an mRNA, to which they have a complementary region. Thus, ribozymes (e.g., hammerhead ribozymes as described in Haselhoff and Gerlach, 1988, Nature 334:585-591) can be used to catalytically cleave mRNA transcripts to thereby inhibit translation of the protein encoded by the mRNA. A ribozyme having specificity for a nucleic acid molecule encoding a polypeptide corresponding to a marker of the invention can be designed based upon the nucleotide sequence of a cDNA corresponding to the marker. For example, a derivative of a Tetrahymena L-19 IVS RNA can be constructed in which the nucleotide sequence of the active site is complementary to the nucleotide sequence to be cleaved (see Cech et al. U.S. Pat. No. 4,987,071; and Cech et al. U.S. Pat. No. 5,116,742). Alternatively, an mRNA encoding a polypeptide of the invention can be used to select a catalytic RNA having a specific ribonuclease activity from a pool of RNA molecules (see, e.g., Bartel and Szostak, 1993, Science 261:1411-1418).

[0150] The invention also encompasses nucleic acid molecules which form triple helical structures. For example, expression of a polypeptide of the invention can be inhibited by targeting nucleotide sequences complementary to the regulatory region of the gene encoding the polypeptide (e.g., the promoter and/or enhancer) to form triple helical structures that prevent transcription of the gene in target cells. See generally Helene (1991) Anticancer Drug Des. 6(6):569-84; Helene (1992) Ann. N.Y. Acad. Sci. 660:27-36; and Maher (1992) Bioassays 14(12):807-15.

[0151] In various embodiments, the nucleic acid molecules of the invention can be modified at the base moiety, sugar moiety or phosphate backbone to improve, e.g., the stability, hybridization, or solubility of the molecule. For example, the deoxyribose phosphate backbone of the nucleic acid molecules can be modified to generate peptide nucleic acid molecules (see Hyrup et al., 1996, Bioorganic & Medicinal Chemistry 4(1): 5-23). As used herein, the terms “peptide nucleic acids” or “PNAs” refer to nucleic acid mimics, e.g., DNA mimics, in which the deoxyribose phosphate backbone is replaced by a pseudopeptide backbone and only the four natural nucleobases are retained. The neutral backbone of PNAs has been shown to allow for specific hybridization to DNA and RNA under conditions of low ionic strength. The synthesis of PNA oligomers can be performed using standard solid phase peptide synthesis protocols as described in Hyrup et al. (1996), supra; Perry-O'Keefe et al. (1996) Proc. Natl. Acad. Sci. USA 93:14670-675.

[0152] PNAs can be used in therapeutic and diagnostic applications. For example, PNAs can be used as antisense or antigene agents for sequence-specific modulation of gene expression by, e.g., inducing transcription or translation arrest or inhibiting replication. PNAs can also be used, e.g., in the analysis of single base pair mutations in a gene by, e.g., PNA directed PCR clamping; as artificial restriction enzymes when used in combination with other enzymes, e.g., S1 nucleases (Hyrup (1996), supra; or as probes or primers for DNA sequence and hybridization (Hyrup, 1996, supra; Perry-O'Keefe et al., 1996, Proc. Natl. Acad. Sci. USA 93:14670-675).

[0153] In another embodiment, PNAs can be modified, e.g., to enhance their stability or cellular uptake, by attaching lipophilic or other helper groups to PNA, by the formation of PNA-DNA chimeras, or by the use of liposomes or other techniques of drug delivery known in the art. For example, PNA-DNA chimeras can be generated which can combine the advantageous properties of PNA and DNA. Such chimeras allow DNA recognition enzymes, e.g., RNASE H and DNA polymerases, to interact with the DNA portion while the PNA portion would provide high binding affinity and specificity. PNA-DNA chimeras can be linked using linkers of appropriate lengths selected in terms of base stacking, number of bonds between the nucleobases, and orientation (Hyrup, 1996, supra). The synthesis of PNA-DNA chimeras can be performed as described in Hyrup (1996), supra, and Finn et al. (1996) Nucleic Acids Res. 24(17):3357-63. For example, a DNA chain can be synthesized on a solid support using standard phosphoramidite coupling chemistry and modified nucleoside analogs. Compounds such as 5′-(4-methoxytrityl)amino-5′-deoxy-thymidine phosphoramidite can be used as a link between the PNA and the 5′ end of DNA (Mag et al., 1989, Nucleic Acids Res. 17:5973-88). PNA monomers are then coupled in a step-wise manner to produce a chimeric molecule with a 5′ PNA segment and a 3′ DNA segment (Finn et al., 1996, Nucleic Acids Res. 24(17):3357-63). Alternatively, chimeric molecules can be synthesized with a 5′ DNA segment and a 3′ PNA segment (Peterser et al., 1975, Bioorganic Med. Chem. Lett. 5:1119-11124).

[0154] In other embodiments, the oligonucleotide can include other appended groups such as peptides (e.g., for targeting host cell receptors in vivo), or agents facilitating transport across the cell membrane (see, e.g., Letsinger et al., 1989, Proc. Natl. Acad. Sci. USA 86:6553-6556; Lemaitre et al., 1987, Proc. Natl. Acad. Sci. USA 84:648-652; PCT Publication No. WO 88/09810) or the blood-brain barrier (see, e.g., PCT Publication No. WO 89/10134). In addition, oligonucleotides can be modified with hybridization-triggered cleavage agents (see, e.g., Krol et al., 1988, Bio/Techniques 6:958-976) or intercalating agents (see, e.g., Zon, 1988, Pharm. Res. 5:539-549). To this end, the oligonucleotide can be conjugated to another molecule, e.g., a peptide, hybridization triggered cross-linking agent, transport agent, hybridization-triggered cleavage agent, etc.

[0155] The invention also includes molecular beacon nucleic acid molecules having at least one region which is complementary to a nucleic acid molecule of the invention, such that the molecular beacon is useful for quantitating the presence of the nucleic acid molecule of the invention in a sample. A “molecular beacon” nucleic acid is a nucleic acid molecule comprising a pair of complementary regions and having a fluorophore and a fluorescent quencher associated therewith. The fluorophore and quencher are associated with different portions of the nucleic acid in such an orientation that when the complementary regions are annealed with one another, fluorescence of the fluorophore is quenched by the quencher. When the complementary regions of the nucleic acid molecules are not annealed with one another, fluorescence of the fluorophore is quenched to a lesser degree. Molecular beacon nucleic acid molecules are described, for example, in U.S. Pat. No. 5,876,930.

[0156] In another embodiment, a nucleic acid molecule contains sequences which naturally flank the nucleic acid (i.e., sequences located at the 5′ and 3′ ends of the nucleic acid) in the genomic DNA of the organism from which the nucleic acid is derived. In various embodiments, the isolated nucleic acid molecule can contain about 100 kB, 50 kB, 25 kB, 15 kB, 10 kB, 5 kB, 4 kB, 3 kB, 2 kB, 1 kB, 0.5 kB or 0.1 kB of nucleotide sequences which naturally flank the nucleic acid molecule in genomic DNA of the cell from which the nucleic acid is derived. For example, in various embodiments, the nucleic acid molecules of the invention contain temporal and spatial regulatory elements (e.g., elements that restrict the expression of the markers of the invention to neuroglia, e.g., astrocytes, or restrict the expression of the marker of the invention to a specific developmental stage), that are proximal or 5′ to the initiation signal, e.g., the initiating ATG codon. Moreover, a nucleic acid molecule can be substantially free of other cellular material or culture medium when produced by recombinant techniques, or substantially free of chemical precursors or other chemicals when chemically synthesized.

[0157] Nucleic acid molecules of the invention corresponding to temporal and spatial regulatory elements, e.g., temporal and spatial promotors, of a marker of the invention can be used to construct recombinant expression vectors. The identification of temporal and spatial regulatory elements (e.g., neuroglial specific regulatory elements such as astrocyte specific regulatory elements), can be performed by creating recombinant expression vectors containing nucleic acid molecules with putative temporal and spatial regulatory elements operably linked to sites of inducible recombination, such as, for example, lox sites, e.g., loxP sites, and optionally further operably linked to a reporter sequence, such as, for example, LacZ, GFP, and EGFP. Such recombinant expression vectors can be used to generate transgenic animals, the cells of which can subsequently be examined for temporal and spatial restriction of the reporter sequence, e.g., expression substantially only in neuroglial cells, e.g., astrocytes, to identify nucleic acid molecules of the invention corresponding to temporal and spatial regulatory elements.

[0158] Such transgenic animals as described above (and in Section V) are not only useful for identifying spatial and temporal regulatory elements, but are also useful for studying the function and/or activity of the polypeptide corresponding to the marker of the invention, for identifying and/or evaluating modulators of polypeptide activity, as well as in pre-clinical testing of therapeutics or diagnostic agents, for marker discovery or evaluation, e.g., therapeutic and diagnostic marker discovery or evaluation, or as surrogates of drug efficacy and specificity. Furthermore, such animals are useful for the investigation of the effect, e.g., physiological effect, of a temporal and spatial restriction of a gene of interest. For example, a transgene may cause lethality due to the requirement of the gene at a particular point in development. However, the same transgene under the control of a spatially and/or temporally regulated promoter may be induced subsequent to the point in time that loss of the gene causes lethality and/or in a specific tissue that does not cause lethality. Alternatively, a gene that is ubiquitously expressed in normal cells, e.g., cells not afflicted with a disease, disorder, or condition, may be preferentially overexpressed or misexpressed in a disease, disorder, or condition, such as, for example, a neurological disease, disorder, or condition, such as a cancer of the central nervous system. For example, epidermal growth factor receptor (EGFR) is expressed in many tissues of the embryo and adult, but has been shown to be overexpressed specifically in neuroglial cells, e.g., astrocytes, in a neurological disease, disorder and condition. Operably linking EGFR to a spatially restricted promoter of the invention, e.g., an astrocyte-specific promoter, and further operably linking an inducible promoter, such as, for example, the CRE:estrogen receptor, will allow controlled expression, e.g., inducible expression, of EGFR in specific cell types, e.g., neuroglia, e.g., astrocytes, in order to more closely model a neurological disease, disorder, or condition for the study of the progression, maintenance, and/or response to treatment of a neurological disease, disorder, or condition.

### IV. ISOLATED PROTEINS AND ANTIBODIES

[0159] One aspect of the invention pertains to isolated proteins which correspond to individual markers of the invention, and biologically active portions thereof, as well as polypeptide fragments suitable for use as immunogens to raise antibodies directed against a polypeptide corresponding to a marker of the invention. In one embodiment, the native polypeptide corresponding to a marker can be isolated from cells or tissue sources by an appropriate purification scheme using standard protein purification techniques. In another embodiment, polypeptides corresponding to a marker of the invention are produced by recombinant DNA techniques. Alternative to recombinant expression, a polypeptide corresponding to a marker of the invention can be synthesized chemically using standard peptide synthesis techniques.

[0160] An “isolated” or “purified” protein or biologically active portion thereof is substantially free of cellular material or other contaminating proteins from the cell or tissue source from which the protein is derived, or substantially free of chemical precursors or other chemicals when chemically synthesized. The language “substantially free of cellular material” includes preparations of protein in which the protein is separated from cellular components of the cells from which it is isolated or recombinantly produced. Thus, protein that is substantially free of cellular material includes preparations of protein having less than about 30%, 20%, 10%, or 5% (by dry weight) of heterologous protein (also referred to herein as a “contaminating protein”). When the protein or biologically active portion thereof is recombinantly produced, it is also preferably substantially free of culture medium, i.e., culture medium represents less than about 20%, 10%, or 5% of the volume of the protein preparation. When the protein is produced by chemical synthesis, it is preferably substantially free of chemical precursors or other chemicals, i.e., it is separated from chemical precursors or other chemicals which are involved in the synthesis of the protein. Accordingly such preparations of the protein have less than about 30%, 20%, 10%, 5% (by dry weight) of chemical precursors or compounds other than the polypeptide of interest.

[0161] Biologically active portions of a polypeptide corresponding to a marker of the invention include polypeptides comprising amino acid sequences sufficiently identical to or derived from the amino acid sequence of the protein corresponding to the marker (e.g., the protein encoded by the nucleic acid molecules listed in Table 2), which include fewer amino acids than the full length protein, and exhibit at least one activity of the corresponding full-length protein. Typically, biologically active portions comprise a domain or motif with at least one activity of the corresponding protein. A biologically active portion of a protein of the invention can be a polypeptide which is, for example, 10, 25, 50, 100 or more amino acids in length. Moreover, other biologically active portions, in which other regions of the protein are deleted, can be prepared by recombinant techniques and evaluated for one or more of the functional activities of the native form of a polypeptide of the invention.

[0162] Preferred polypeptides have an amino acid sequence of a protein encoded by a nucleic acid molecule listed in Table 2. Other useful proteins are substantially identical (e.g., at least about 40%, preferably 50%, 60%, 70%, 80%, 90%, 95%, or 99%) to one of these sequences and retain the functional activity of the protein of the corresponding naturally-occurring protein yet differ in amino acid sequence due to natural allelic variation or mutagenesis.

[0163] To determine the percent identity of two amino acid sequences or of two nucleic acids, the sequences are aligned for optimal comparison purposes (e.g., gaps can be introduced in the sequence of a first amino acid or nucleic acid sequence for optimal alignment with a second amino or nucleic acid sequence). The amino acid residues or nucleotides at corresponding amino acid positions or nucleotide positions are then compared. When a position in the first sequence is occupied by the same amino acid residue or nucleotide as the corresponding position in the second sequence, then the molecules are identical at that position. The percent identity between the two sequences is a function of the number of identical positions shared by the sequences (i.e., % identity=# of identical positions/total # of positions (e.g., overlapping positions)×100). In one embodiment the two sequences are the same length.

[0164] The determination of percent identity between two sequences can be accomplished using a mathematical algorithm. A preferred, non-limiting example of a mathematical algorithm utilized for the comparison of two sequences is the algorithm of Karlin and Altschul (1990) Proc. Natl. Acad. Sci. USA 87:2264-2268, modified as in Karlin and Altschul (1993) Proc. Natl. Acad. Sci. USA 90:5873-5877. Such an algorithm is incorporated into the NBLAST and XBLAST programs of Altschul, et al. (1990) J. Mol. Biol. 215:403-410. BLAST nucleotide searches can be performed with the NBLAST program, score=100, wordlength=12 to obtain nucleotide sequences homologous to a nucleic acid molecules of the invention. BLAST protein searches can be performed with the XBLAST program, score=50, wordlength=3 to obtain amino acid sequences homologous to a protein molecules of the invention. To obtain gapped alignments for comparison purposes, Gapped BLAST can be utilized as described in Altschul et al. (1997) Nucleic Acids Res. 25:3389-3402. Alternatively, PSI-Blast can be used to perform an iterated search which detects distant relationships between molecules. When utilizing BLAST, Gapped BLAST, and PSI-Blast programs, the default parameters of the respective programs (e.g., XBLAST and NBLAST) can be used. See http://www.ncbi.nlm.nih.gov. Another preferred, non-limiting example of a mathematical algorithm utilized for the comparison of sequences is the algorithm of Myers and Miller, (1988) Comput Appl Biosci, 4:11-7. Such an algorithm is incorporated into the ALIGN program (version 2.0) which is part of the GCG sequence alignment software package. When utilizing the ALIGN program for comparing amino acid sequences, a PAM120 weight residue table, a gap length penalty of 12, and a gap penalty of 4 can be used. Yet another useful algorithm for identifying regions of local sequence similarity and alignment is the FASTA algorithm as described in Pearson and Lipman (1988) Proc. Natl. Acad. Sci. USA 85:2444-2448. When using the FASTA algorithm for comparing nucleotide or amino acid sequences, a PAM120 weight residue table can, for example, be used with a k-tuple value of 2.

[0165] The percent identity between two sequences can be determined using techniques similar to those described above, with or without allowing gaps. In calculating percent identity, only exact matches are counted.

[0166] The invention also provides chimeric or fusion proteins corresponding to a marker of the invention. As used herein, a “chimeric protein” or “fusion protein” comprises all or part (preferably a biologically active part) of a polypeptide corresponding to a marker of the invention operably linked to a heterologous polypeptide (i.e., a polypeptide other than the polypeptide corresponding to the marker). Within the fusion protein, the term “operably linked” is intended to indicate that the polypeptide of the invention and the heterologous polypeptide are fused in-frame to each other. The heterologous polypeptide can be fused to the amino-terminus or the carboxyl-terminus of the polypeptide of the invention.

[0167] One useful fusion protein is a GST fusion protein in which a polypeptide corresponding to a marker of the invention is fused to the carboxyl terminus of GST sequences. Such fusion proteins can facilitate the purification of a recombinant polypeptide of the invention.

[0168] In another embodiment, the fusion protein contains a heterologous signal sequence at its amino terminus. For example, the native signal sequence of a polypeptide corresponding to a marker of the invention can be removed and replaced with a signal sequence from another protein. For example, the gp67 secretory sequence of the baculovirus envelope protein can be used as a heterologous signal sequence (Ausubel et al., ed., Current Protocols in Molecular Biology, John Wiley & Sons, NY, 1992). Other examples of eukaryotic heterologous signal sequences include the secretory sequences of melittin and human placental alkaline phosphatase (Stratagene; La Jolla, Calif.). In yet another example, useful prokaryotic heterologous signal sequences include the phoA secretory signal (Sambrook et al., supra) and the protein A secretory signal (Pharmacia Biotech; Piscataway, N.J.).

[0169] In yet another embodiment, the fusion protein is an immunoglobulin fusion protein in which all or part of a polypeptide corresponding to a marker of the invention is fused to sequences derived from a member of the immunoglobulin protein family. The immunoglobulin fusion proteins of the invention can be incorporated into pharmaceutical compositions and administered to a subject to inhibit an interaction between a ligand (soluble or membrane-bound) and a protein on the surface of a cell (receptor), to thereby suppress signal transduction in vivo. The immunoglobulin fusion protein can be used to affect the bioavailability of a cognate ligand of a polypeptide of the invention. Inhibition of ligand/receptor interaction can be useful therapeutically, both for treating proliferative and differentiative disorders and for modulating (e.g. promoting or inhibiting) cell survival. Moreover, the immunoglobulin fusion proteins of the invention can be used as immunogens to produce antibodies directed against a polypeptide of the invention in a subject, to purify ligands and in screening assays to identify molecules which inhibit the interaction of receptors with ligands.

[0170] Chimeric and fusion proteins of the invention can be produced by standard recombinant DNA techniques. In another embodiment, the fusion gene can be synthesized by conventional techniques including automated DNA synthesizers. Alternatively, PCR amplification of gene fragments can be carried out using anchor primers which give rise to complementary overhangs between two consecutive gene fragments which can subsequently be annealed and re-amplified to generate a chimeric gene sequence (see, e.g., Ausubel et al., supra). Moreover, many expression vectors are commercially available that already encode a fusion moiety (e.g., a GST polypeptide). A nucleic acid encoding a polypeptide of the invention can be cloned into such an expression vector such that the fusion moiety is linked in-frame to the polypeptide of the invention.

[0171] A signal sequence can be used to facilitate secretion and isolation of the secreted protein or other proteins of interest. Signal sequences are typically characterized by a core of hydrophobic amino acids which are generally cleaved from the mature protein during secretion in one or more cleavage events. Such signal peptides contain processing sites that allow cleavage of the signal sequence from the mature proteins as they pass through the secretory pathway. Thus, the invention pertains to the described polypeptides having a signal sequence, as well as to polypeptides from which the signal sequence has been proteolytically cleaved (i.e., the cleavage products). In one embodiment, a nucleic acid sequence encoding a signal sequence can be operably linked in an expression vector to a protein of interest, such as a protein which is ordinarily not secreted or is otherwise difficult to isolate. The signal sequence directs secretion of the protein, such as from a eukaryotic host into which the expression vector is transformed, and the signal sequence is subsequently or concurrently cleaved. The protein can then be readily purified from the extracellular medium by art recognized methods. Alternatively, the signal sequence can be linked to the protein of interest using a sequence which facilitates purification, such as with a GST domain.

[0172] The present invention also pertains to variants of the polypeptides corresponding to individual markers of the invention. Such variants have an altered amino acid sequence which can function as either agonists (mimetics) or as antagonists. Variants can be generated by mutagenesis, e.g., discrete point mutation or truncation. An agonist can retain substantially the same, or a subset, of the biological activities of the naturally occurring form of the protein. An antagonist of a protein can inhibit one or more of the activities of the naturally occurring form of the protein by, for example, competitively binding to a downstream or upstream member of a cellular signaling cascade which includes the protein of interest. Thus, specific biological effects can be elicited by treatment with a variant of limited function. Treatment of a subject with a variant having a subset of the biological activities of the naturally occurring form of the protein can have fewer side effects in a subject relative to treatment with the naturally occurring form of the protein.

[0173] Variants of a protein of the invention which function as either agonists (mimetics) or as antagonists can be identified by screening combinatorial libraries of mutants, e.g., truncation mutants, of the protein of the invention for agonist or antagonist activity. In one embodiment, a variegated library of variants is generated by combinatorial mutagenesis at the nucleic acid level and is encoded by a variegated gene library. A variegated library of variants can be produced by, for example, enzymatically ligating a mixture of synthetic oligonucleotides into gene sequences such that a degenerate set of potential protein sequences is expressible as individual polypeptides, or alternatively, as a set of larger fusion proteins (e.g., for phage display). There are a variety of methods which can be used to produce libraries of potential variants of the polypeptides of the invention from a degenerate oligonucleotide sequence. Methods for synthesizing degenerate oligonucleotides are known in the art (see, e.g., Narang, 1983, Tetrahedron 39:3; Itakura et al., 1984, Annu. Rev. Biochem. 53:323; Itakura et al., 1984, Science 198:1056; Ike et al., 1983 Nucleic Acid Res. 11:477).

[0174] In addition, libraries of fragments of the coding sequence of a polypeptide corresponding to a marker of the invention can be used to generate a variegated population of polypeptides for screening and subsequent selection of variants. For example, a library of coding sequence fragments can be generated by treating a double stranded PCR fragment of the coding sequence of interest with a nuclease under conditions wherein nicking occurs only about once per molecule, denaturing the double stranded DNA, renaturing the DNA to form double stranded DNA which can include sense/antisense pairs from different nicked products, removing single stranded portions from reformed duplexes by treatment with S1 nuclease, and ligating the resulting fragment library into an expression vector. By this method, an expression library can be derived which encodes amino terminal and internal fragments of various sizes of the protein of interest.

[0175] Several techniques are known in the art for screening gene products of combinatorial libraries made by point mutations or truncation, and for screening cDNA libraries for gene products having a selected property. The most widely used techniques, which are amenable to high throughput analysis, for screening large gene libraries typically include cloning the gene library into replicable expression vectors, transforming appropriate cells with the resulting library of vectors, and expressing the combinatorial genes under conditions in which detection of a desired activity facilitates isolation of the vector encoding the gene whose product was detected. Recursive ensemble mutagenesis (REM), a technique which enhances the frequency of functional mutants in the libraries, can be used in combination with the screening assays to identify variants of a protein of the invention (Arkin and Yourvan, 1992, Proc. Natl. Acad. Sci. USA 89:7811-7815; Delgrave et al., 1993, Protein Engineering 6(3):327-331).

[0176] An isolated polypeptide corresponding to a marker of the invention, or a fragment thereof, can be used as an immunogen to generate antibodies using standard techniques for polyclonal and monoclonal antibody preparation. The full-length polypeptide or protein can be used or, alternatively, the invention provides antigenic peptide fragments for use as immunogens. The antigenic peptide of a protein of the invention comprises at least 8 (preferably 10, 15, 20, or 30 or more) amino acid residues of the amino acid sequence of one of the polypeptides of the invention, and encompasses an epitope of the protein such that an antibody raised against the peptide forms a specific immune complex with a marker of the invention to which the protein corresponds. Preferred epitopes encompassed by the antigenic peptide are regions that are located on the surface of the protein, e.g., hydrophilic regions. Hydrophobicity sequence analysis, hydrophilicity sequence analysis, or similar analyses can be used to identify hydrophilic regions.

[0177] An immunogen typically is used to prepare antibodies by immunizing a suitable (i.e. immunocompetent) subject such as a rabbit, goat, mouse, or other mammal or vertebrate.

[0178] An appropriate immunogenic preparation can contain, for example, recombinantly-expressed or chemically-synthesized polypeptide. The preparation can further include an adjuvant, such as Freund's complete or incomplete adjuvant, or a similar immunostimulatory agent.

[0179] Accordingly, another aspect of the invention pertains to antibodies directed against a polypeptide of the invention. The terms “antibody” and “antibody substance” as used interchangeably herein refer to immunoglobulin molecules and immunologically active portions of immunoglobulin molecules, i.e., molecules that contain an antigen binding site which specifically binds an antigen, such as a polypeptide of the invention. A molecule which specifically binds to a given polypeptide of the invention is a molecule which binds the polypeptide, but does not substantially bind other molecules in a sample, e.g., a biological sample, which naturally contains the polypeptide. Examples of immunologically active portions of immunoglobulin molecules include F(ab) and F(ab′)₂ fragments which can be generated by treating the antibody with an enzyme such as pepsin. The invention provides polyclonal and monoclonal antibodies. The term “monoclonal antibody” or “monoclonal antibody composition”, as used herein, refers to a population of antibody molecules that contain only one species of an antigen binding site capable of immunoreacting with a particular epitope.

[0180] Polyclonal antibodies can be prepared as described above by immunizing a suitable subject with a polypeptide of the invention as an immunogen. The antibody titer in the immunized subject can be monitored over time by standard techniques, such as with an enzyme linked immunosorbent assay (ELISA) using immobilized polypeptide. If desired, the antibody molecules can be harvested or isolated from the subject (e.g., from the blood or serum of the subject) and further purified by well-known techniques, such as protein A chromatography to obtain the IgG fraction. At an appropriate time after immunization, e.g., when the specific antibody titers are highest, antibody-producing cells can be obtained from the subject and used to prepare monoclonal antibodies by standard techniques, such as the hybridoma technique originally described by Kohler and Milstein (1975) Nature 256:495-497, the human B cell hybridoma technique (see Kozbor et al., 1983, Immunol. Today 4:72), the EBV-hybridoma technique (see Cole et al, pp. 77-96 In Monoclonal Antibodies and Cancer Therapy, Alan R. Liss, Inc., 1985) or trioma techniques. The technology for producing hybridomas is well known (see generally Current Protocols in Immunology, Coligan et al. ed., John Wiley & Sons, New York, 1994). Hybridoma cells producing a monoclonal antibody of the invention are detected by screening the hybridoma culture supernatants for antibodies that bind the polypeptide of interest, e.g., using a standard ELISA assay.

[0181] Alternative to preparing monoclonal antibody-secreting hybridomas, a monoclonal antibody directed against a polypeptide of the invention can be identified and isolated by screening a recombinant combinatorial immunoglobulin library (e.g., an antibody phage display library) with the polypeptide of interest. Kits for generating and screening phage display libraries are commercially available (e.g., the Pharmacia Recombinant Phage Antibody System, Catalog No. 27-9400-01; and the Stratagene SurfZAP Phage Display Kit, Catalog No. 240612). Additionally, examples of methods and reagents particularly amenable for use in generating and screening antibody display library can be found in, for example, U.S. Pat. No. 5,223,409; PCT Publication No. WO 92/18619; PCT Publication No. WO 91/17271; PCT Publication No. WO 92/20791; PCT Publication No. WO 92/15679; PCT Publication No. WO 93/01288; PCT Publication No. WO 92/01047; PCT Publication No. WO 92/09690; PCT Publication No. WO 90/02809; Fuchs et al. (1991) Bio/Technology 9:1370-1372; Hay et al. (1992) Hum. Antibod. Hybridomas 3:81-85; Huse et al. (1989) Science 246:1275-1281; Griffiths et al. (1993) EMBO J. 12:725-734.

[0182] Additionally, recombinant antibodies, such as chimeric and humanized monoclonal antibodies, comprising both human and non-human portions, which can be made using standard recombinant DNA techniques, are within the scope of the invention. Such chimeric and humanized monoclonal antibodies can be produced by recombinant DNA techniques known in the art, for example using methods described in PCT Publication No. WO 87/02671; European Patent Application 184,187; European Patent Application 171,496; European Patent Application 173,494; PCT Publication No. WO 86/01533; U.S. Pat. No. 4,816,567; European Patent Application 125,023; Better et al. (1988) Science 240:1041-1043; Liu et al. (1987) Proc. Natl. Acad. Sci. USA 84:3439-3443; Liu et al. (1987) J. Immunol. 139:3521-3526; Sun et al. (1987) Proc. Natl. Acad. Sci. USA 84:214-218; Nishimura et al. (1987) Cancer Res. 47:999-1005; Wood et al. (1985) Nature 314:446-449; and Shaw et al. (1988) J. Natl. Cancer Inst. 80:1553-1559); Morrison (1985) Science 229:1202-1207; Oi et al. (1986) Bio/Techniques 4:214; U.S. Pat. No. 5,225,539; Jones et al. (1986) Nature 321:552-525; Verhoeyan et al. (1988) Science 239:1534; and Beidler et al (1988) J. Immunol. 141:4053-4060.

[0183] Completely human antibodies are particularly desirable for therapeutic treatment of human subjects. Such antibodies can be produced using transgenic mice which are incapable of expressing endogenous immunoglobulin heavy and light chains genes, but which can express human heavy and light chain genes. The transgenic mice are immunized in the normal fashion with a selected antigen, e.g., all or a portion of a polypeptide corresponding to a marker of the invention. Monoclonal antibodies directed against the antigen can be obtained using conventional hybridoma technology. The human immunoglobulin transgenes harbored by the transgenic mice rearrange during B cell differentiation, and subsequently undergo class switching and somatic mutation. Thus, using such a technique, it is possible to produce therapeutically useful IgG, IgA and IgE antibodies. For an overview of this technology for producing human antibodies, see Lonberg and Huszar (1995) Int. Rev. Immunol. 13:65-93). For a detailed discussion of this technology for producing human antibodies and human monoclonal antibodies and protocols for producing such antibodies, see, e.g., U.S. Pat. No. 5,625,126; U.S. Pat. No. 5,633,425; U.S. Pat. No. 5,569,825; U.S. Pat. No. 5,661,016; and U.S. Pat. No. 5,545,806. In addition, companies such as Abgenix, Inc. (Freemont, Calif.), can be engaged to provide human antibodies directed against a selected antigen using technology similar to that described above.

[0184] Completely human antibodies which recognize a selected epitope can be generated using a technique referred to as “guided selection.” In this approach a selected non-human monoclonal antibody, e.g., a murine antibody, is used to guide the selection of a completely human antibody recognizing the same epitope (Jespers et al., 1994, Bio/technology 12:899-903).

[0185] An antibody, antibody derivative, or fragment thereof, which specifically binds a marker of the invention which is modulated in a neurological disease, disorder, or condition (e.g., a marker set forth in Table 2), may be used to inhibit activity of a marker, e.g., a marker set forth in Table 2, and therefore may be administered to a subject to treat, inhibit, or prevent cancer in the subject. Furthermore, conjugated antibodies may also be used to treat, inhibit, or prevent cancer in a subject. Conjugated antibodies, preferably monoclonal antibodies, or fragments thereof, are antibodies which are joined to drugs, toxins, or radioactive atoms, and used as delivery vehicles to deliver those substances directly to cancer cells. The antibody, e.g., an antibody which specifically binds a marker of the invention (e.g., a marker listed in Table 2), is administered to a subject and binds the marker, thereby delivering the toxic substance to the afflicted cell, minimizing damage to normal cells in other parts of the body.

[0186] Conjugated antibodies are also referred to as “tagged,” “labeled,” or “loaded.” Antibodies with chemotherapeutic agents attached are generally referred to as chemolabeled. Antibodies with radioactive particles attached are referred to as radiolabeled, and this type of therapy is known as radioimmunotherapy (RIT). Aside from being used to treat cancer, radiolabeled antibodies can also be used to detect areas of cancer spread in the body. Antibodies attached to toxins are called immunotoxins.

[0187] Immunotoxins are made by attaching toxins (e.g., poisonous substances from plants or bacteria) to monoclonal antibodies. Immunotoxins may be produced by attaching monoclonal antibodies to bacterial toxins such as diphtherial toxin (DT) or pseudomonal exotoxin (PE40), or to plant toxins such as ricin A or saporin.

[0188] An antibody directed against a polypeptide corresponding to a marker of the invention (e.g., a monoclonal antibody) can be used to isolate the polypeptide by standard techniques, such as affinity chromatography or immunoprecipitation. Moreover, such an antibody can be used to detect the marker (e.g., in a cellular lysate or cell supernatant) in order to evaluate the level and pattern of expression of the marker. The antibodies can also be used diagnostically to monitor protein levels in tissues or body fluids (e.g. in an ovary-associated body fluid) as part of a clinical testing procedure, e.g., to, for example, determine the efficacy of a given treatment regimen. Detection can be facilitated by coupling the antibody to a detectable substance. Examples of detectable substances include various enzymes, prosthetic groups, fluorescent materials, luminescent materials, bioluminescent materials, and radioactive materials. Examples of suitable enzymes include horseradish peroxidase, alkaline phosphatase, β-galactosidase, or acetylcholinesterase; examples of suitable prosthetic group complexes include streptavidin/biotin and avidin/biotin; examples of suitable fluorescent materials include umbelliferone, fluorescein, fluorescein isothiocyanate, rhodamine, dichlorotriazinylamine fluorescein, dansyl chloride or phycoerythrin; an example of a luminescent material includes luminol; examples of bioluminescent materials include luciferase, luciferin, and aequorin, and examples of suitable radioactive material include ¹²⁵I, ¹³¹I, ³⁵S or ³H.

### V. RECOMBINANT EXPRESSION VECTORS AND HOST CELLS

[0189] Another aspect of the invention pertains to vectors, preferably expression vectors, containing a nucleic acid encoding a polypeptide corresponding to a marker of the invention (or a portion of such a polypeptide). As used herein, the term “vector” refers to a nucleic acid molecule capable of transporting another nucleic acid to which it has been linked. One type of vector is a “plasmid”, which refers to a circular double stranded DNA loop into which additional DNA segments can be ligated. Another type of vector is a viral vector, wherein additional DNA segments can be ligated into the viral genome. Certain vectors are capable of autonomous replication in a host cell into which they are introduced (e.g., bacterial vectors having a bacterial origin of replication and episomal mammalian vectors). Other vectors (e.g., non-episomal mammalian vectors) are integrated into the genome of a host cell upon introduction into the host cell, and thereby are replicated along with the host genome. Moreover, certain vectors, namely expression vectors, are capable of directing the expression of genes to which they are operably linked. In general, expression vectors of utility in recombinant DNA techniques are often in the form of plasmids (vectors). However, the invention is intended to include such other forms of expression vectors, such as viral vectors (e.g., replication defective retroviruses, adenoviruses and adeno-associated viruses), which serve equivalent functions.

[0190] The recombinant expression vectors of the invention comprise a nucleic acid of the invention in a form suitable for expression of the nucleic acid in a host cell. This means that the recombinant expression vectors include one or more regulatory sequences, selected on the basis of the host cells to be used for expression, which is operably linked to the nucleic acid sequence to be expressed. Within a recombinant expression vector, “operably linked” is intended to mean that the nucleotide sequence of interest is linked to the regulatory sequence(s) in a manner which allows for expression of the nucleotide sequence (e.g., in an in vitro transcription/translation system or in a host cell when the vector is introduced into the host cell). The term “regulatory sequence” is intended to include promoters, enhancers and other expression control elements (e.g., polyadenylation signals). Such regulatory sequences are described, for example, in Goeddel, Methods in Enzymology: Gene Expression Technology vol. 185, Academic Press, San Diego, Calif. (1991). Regulatory sequences include those which direct constitutive expression of a nucleotide sequence in many types of host cell and those which direct expression of the nucleotide sequence only in certain host cells (e.g., tissue-specific regulatory sequences). It will be appreciated by those skilled in the art that the design of the expression vector can depend on such factors as the choice of the host cell to be transformed, the level of expression of protein desired, and the like. The expression vectors of the invention can be introduced into host cells to thereby produce proteins or peptides, including fusion proteins or peptides, encoded by nucleic acids as described herein.

[0191] The recombinant expression vectors of the invention can be designed for expression of a polypeptide corresponding to a marker of the invention in prokaryotic (e.g., E. coli) or eukaryotic cells (e.g., insect cells {using baculovirus expression vectors}, yeast cells or mammalian cells). Suitable host cells are discussed further in Goeddel, supra. Alternatively, the recombinant expression vector can be transcribed and translated in vitro, for example using T7 promoter regulatory sequences and T7 polymerase.

[0192] Expression of proteins in prokaryotes is most often carried out in E. coli with vectors containing constitutive or inducible promoters directing the expression of either fusion or non-fusion proteins. Fusion vectors add a number of amino acids to a protein encoded therein, usually to the amino terminus of the recombinant protein. Such fusion vectors typically serve three purposes: 1) to increase expression of recombinant protein; 2) to increase the solubility of the recombinant protein; and 3) to aid in the purification of the recombinant protein by acting as a ligand in affinity purification. Often, in fusion expression vectors, a proteolytic cleavage site is introduced at the junction of the fusion moiety and the recombinant protein to enable separation of the recombinant protein from the fusion moiety subsequent to purification of the fusion protein. Such enzymes, and their cognate recognition sequences, include Factor Xa, thrombin and enterokinase. Typical fusion expression vectors include pGEX (Pharmacia Biotech Inc; Smith and Johnson, 1988, Gene 67:31-40), pMAL (New England Biolabs, Beverly, Mass.) and pRIT5 (Pharmacia, Piscataway, N.J.) which fuse glutathione S-transferase (GST), maltose E binding protein, or protein A, respectively, to the target recombinant protein.

[0193] Examples of suitable inducible non-fusion E. coli expression vectors include pTrc (Amann et al., 1988, Gene 69:301-315) and pET 11d (Studier et al., p. 60-89, In Gene Expression Technology: Methods in Enzymology vol. 185, Academic Press, San Diego, Calif., 1991). Target gene expression from the pTrc vector relies on host RNA polymerase transcription from a hybrid trp-lac fusion promoter. Target gene expression from the pET 11d vector relies on transcription from a T7 gn10-lac fusion promoter mediated by a co-expressed viral RNA polymerase (T7 gn1). This viral polymerase is supplied by host strains BL21(DE3) or HMS174(DE3) from a resident prophage harboring a T7 gn1 gene under the transcriptional control of the lacUV 5 promoter.

[0194] One strategy to maximize recombinant protein expression in E. coli is to express the protein in a host bacteria with an impaired capacity to proteolytically cleave the recombinant protein (Gottesman, p. 119-128, In Gene Expression Technology: Methods in Enzymology vol. 185, Academic Press, San Diego, Calif., 1990. Another strategy is to alter the nucleic acid sequence of the nucleic acid to be inserted into an expression vector so that the individual codons for each amino acid are those preferentially utilized in E. coli (Wada et al., 1992, Nucleic Acids Res. 20:2111-2118). Such alteration of nucleic acid sequences of the invention can be carried out by standard DNA synthesis techniques.

[0195] In another embodiment, the expression vector is a yeast expression vector. Examples of vectors for expression in yeast S. cerevisiae include pYepSec1 (Baldari et al., 1987, EMBO J. 6:229-234), pMFa (Kurjan and Herskowitz, 1982, Cell 30:933-943), pJRY88 (Schultz et al., 1987, Gene 54:113-123), pYES2 (Invitrogen Corporation, San Diego, Calif.), and pPicZ (Invitrogen Corp, San Diego, Calif.).

[0196] Alternatively, the expression vector is a baculovirus expression vector. Baculovirus vectors available for expression of proteins in cultured insect cells (e.g., Sf9 cells) include the pAc series (Smith et al., 1983, Mol. Cell. Biol. 3:2156-2165) and the pVL series (Lucklow and Summers, 1989, Virology 170:31-39).

[0197] In yet another embodiment, a nucleic acid of the invention is expressed in mammalian cells using a mammalian expression vector. Examples of mammalian expression vectors include pCDM8 (Seed, 1987, Nature 329:840) and pMT2PC (Kaufman et al., 1987, EMBO J. 6:187-195). When used in mammalian cells, the expression vector's control functions are often provided by viral regulatory elements. For example, commonly used promoters are derived from polyoma, Adenovirus 2, cytomegalovirus and Simian Virus 40. For other suitable expression systems for both prokaryotic and eukaryotic cells see chapters 16 and 17 of Sambrook et al., supra.

[0198] In another embodiment, the recombinant mammalian expression vector is capable of directing expression of the nucleic acid preferentially in a particular cell type (e.g., tissue-specific regulatory elements are used to express the nucleic acid). Tissue-specific regulatory elements are known in the art. Non-limiting examples of suitable tissue-specific promoters include the albumin promoter (liver-specific; Pinkert et al., 1987, Genes Dev. 1:268-277), lymphoid-specific promoters (Calame and Eaton, 1988, Adv. Immunol. 43:235-275), in particular promoters of T cell receptors (Winoto and Baltimore, 1989, EMBO J. 8:729-733) and immunoglobulins (Banerji et al., 1983, Cell 33:729-740; Queen and Baltimore, 1983, Cell 33:741-748), neuron-specific promoters (e.g., the neurofilament promoter; Byrne and Ruddle, 1989, Proc. Natl. Acad. Sci. USA 86:5473-5477), pancreas-specific promoters (Edlund et al., 1985, Science 230:912-916), and mammary gland-specific promoters (e.g., milk whey promoter; U.S. Pat. No. 4,873,316 and European Application Publication No. 264,166). Developmentally-regulated promoters are also encompassed, for example the murine hox promoters (Kessel and Gruss, 1990, Science 249:374-379) and the α-fetoprotein promoter (Camper and Tilghman, 1989, Genes Dev. 3:537-546).

[0199] Moreover, inducible regulatory systems for use in mammalian cells are known in the art, for example systems in which gene expression is regulated by heavy metal ions (see e.g., Mayo et al. (1982) Cell 29:99-108; Brinster et al. (1982) Nature 296:39-42; Searle et al. (1985) Mol. Cell. Biol. 5:1480-1489), heat shock (see e.g., Nouer et al. (1991) in Heat Shock Response, e.d. Nouer, L., CRC, Boca Raton, Fla., pp 167-220), hormones (see e.g., Lee et al. (1981) Nature 294:228-232; Hynes et al. (1981) Proc. Natl. Acad. Sci. USA 78:2038-2042; Klock et al. (1987) Nature 329:734-736; Israel & Kaufman (1989) Nucl. Acids Res. 17:2589-2604; and PCT Publication No. WO 93/23431), FK506-related molecules (see e.g., PCT Publication No. WO 94/18317) or tetracyclines (Gossen, M. and Bujard, H. (1992) Proc. Natl. Acad. Sci. USA 89:5547-5551; Gossen, M. et al. (1995) Science 268:1766-1769; PCT Publication No. WO 94/29442; and PCT Publication No. WO 96/01313). Accordingly, in another embodiment, the invention provides a recombinant expression vector in which DNA corresponding to a marker of the invention is operatively linked to an inducible eukaryotic promoter, thereby allowing for inducible expression of a protein corresponding to a marker of the invention in eukaryotic cells.

[0200] The invention further provides a recombinant expression vector comprising a DNA molecule of the invention cloned into the expression vector in an antisense orientation. That is, the DNA molecule is operably linked to a regulatory sequence in a manner which allows for expression (by transcription of the DNA molecule) of an RNA molecule which is antisense to the mRNA encoding a polypeptide of the invention. Regulatory sequences operably linked to a nucleic acid cloned in the antisense orientation can be chosen which direct the continuous expression of the antisense RNA molecule in a variety of cell types, for instance viral promoters and/or enhancers, or regulatory sequences can be chosen which direct constitutive, tissue-specific or cell type specific expression of antisense RNA. The antisense expression vector can be in the form of a recombinant plasmid, phagemid, or attenuated virus in which antisense nucleic acids are produced under the control of a high efficiency regulatory region, the activity of which can be determined by the cell type into which the vector is introduced. For a discussion of the regulation of gene expression using antisense genes see Weintraub et al., 1986, Trends in Genetics, Vol. 1(1).

[0201] Another aspect of the invention pertains to host cells into which a recombinant expression vector of the invention has been introduced. The terms “host cell” and “recombinant host cell” are used interchangeably herein. It is understood that such terms refer not only to the particular subject cell but to the progeny or potential progeny of such a cell. Because certain modifications may occur in succeeding generations due to either mutation or environmental influences, such progeny may not, in fact, be identical to the parent cell, but are still included within the scope of the term as used herein.

[0202] A host cell can be any prokaryotic (e.g., E. coli) or eukaryotic cell (e.g., insect cells, yeast or mammalian cells).

[0203] Vector DNA can be introduced into prokaryotic or eukaryotic cells via conventional transformation or transfection techniques. As used herein, the terms “transformation” and “transfection” are intended to refer to a variety of art-recognized techniques for introducing foreign nucleic acid into a host cell, including calcium phosphate or calcium chloride co-precipitation, DEAE-dextran-mediated transfection, lipofection, or electroporation. Suitable methods for transforming or transfecting host cells can be found in Sambrook, et al. (supra), and other laboratory manuals.

[0204] For stable transfection of mammalian cells, it is known that, depending upon the expression vector and transfection technique used, only a small fraction of cells may integrate the foreign DNA into their genome. In order to identify and select these integrants, a gene that encodes a selectable marker (e.g., for resistance to antibiotics) is generally introduced into the host cells along with the gene of interest. Preferred selectable markers include those which confer resistance to drugs, such as G418, hygromycin and methotrexate. Cells stably transfected with the introduced nucleic acid can be identified by drug selection (e.g., cells that have incorporated the selectable marker gene will survive, while the other cells die).

[0205] A host cell of the invention, such as a prokaryotic or eukaryotic host cell in culture, can be used to produce a polypeptide corresponding to a marker of the invention. Accordingly, the invention further provides methods for producing a polypeptide corresponding to a marker of the invention using the host cells of the invention. In one embodiment, the method comprises culturing the host cell of invention (into which a recombinant expression vector encoding a polypeptide of the invention has been introduced) in a suitable medium such that the marker is produced. In another embodiment, the method further comprises isolating the marker polypeptide from the medium or the host cell.

[0206] The host cells of the invention can also be used to produce nonhuman transgenic animals. For example, in one embodiment, a host cell of the invention is a fertilized oocyte or an embryonic stem cell into which sequences encoding a polypeptide corresponding to a marker of the invention have been introduced.

[0207] In another embodiment, a host cell of the invention is a fertilized oocyte or an embryonic stem cell into which sequences corresponding to spatially or temporally restricted promotor elements of a marker of the invention, e.g., neuroglial-specific regulatory elements, e.g., astrocyte-specific regulatory elements, operably linked to a conditional allele. As used herein, a “conditional allele” refers to a form of a transgene whose expression is regulated and/or a transgene that may be inducibly altered in function and/or structure by application, administration or expression of an exogenous reagent (e.g., Cre recombinase expression, tamoxifen treatment) or a state change (e.g., temperature change), such that the activity or abundance of the transgene, expressed transcript, or encoded gene product is changed. The Cre-lox recombination system is described in, for example, Baubonis, W. and Sauer, B. (1993) Nucl. Acids Res. 21:2025-2029; and Fukushige, S, and Sauer, B. (1992) Proc. Natl. Acad. Sci. USA 89:7905-7909) and the FLP recombinase-FRT target system (e.g., as described in Dang, D. T. and Perrimon, N. (1992) Dev. Genet. 13:367-375; and Fiering, S. et al. (1993) Proc. Natl. Acad. Sci. USA 90:8469-8473). Additionally, conditional alleles can be generated utilizing tetracycline-regulated inducible homologous recombination systems, such as described in PCT Publication No. WO 94/29442 and PCT Publication No. WO 96/01313 or the FLP recombinase system of Saccharomyces cerevisiae (O'Gorman et al., 1991, Science 251:1351-1355).

[0208] In certain embodiments of the invention, the spatially or temporally restricted promotor elements e.g., neuroglial specific promotor elements, e.g., astrocyte specific promotor elements, operably linked to Cre, are further operably linked to an inducible fusion protein, such as, for example, the estrogen receptor (ERT2), whose protein product is a fusion of Cre recombinase and a mutant mouse estrogen receptor ligand binding domain that cannot bind estrogen at physiologic concentrations, but does bind tamoxifen. The ubiquitously-expressed fusion protein is restricted to the cytoplasm in the absence of tamoxifen; upon binding to tamoxifen, it becomes translocated to the nucleus as described in, for example, Leone D P, et al. (2003) Mol Cell Neurosci. 22:430-40.

[0209] In yet another embodiment of the invention, the spatially or temporally restricted promotor elements are operably linked to sites of inducible recombination, e.g., lox sites, e.g., loxP sites, and optionally further operably linked to a reporter sequence, e.g., lacZ, GFP, EGFP, as described above.

[0210] Such host cells can then be used to create non-human transgenic animals in which exogenous sequences encoding a marker protein or spatially or temporally restricted promotor elements of the invention have been introduced into their genome or homologous recombinant animals in which endogenous gene(s) encoding a polypeptide corresponding to a marker of the invention sequences have been altered.

[0211] As used herein, a “transgenic animal” is a non-human animal, preferably a mammal, more preferably a rodent such as a rat or mouse, in which one or more of the cells of the animal includes a transgene. Other examples of transgenic animals include non-human primates, sheep, dogs, cows, goats, chickens, amphibians, etc. A transgene is exogenous DNA which is integrated into the genome of a cell from which a transgenic animal develops and which remains in the genome of the mature animal, thereby directing the expression of an encoded gene product in one or more cell types or tissues of the transgenic animal. As used herein, a “homologous recombinant animal” is a non-human animal, preferably a mammal, more preferably a mouse, in which an endogenous gene has been altered by homologous recombination between the endogenous gene and an exogenous DNA molecule introduced into a cell of the animal, e.g., an embryonic cell of the animal, prior to development of the animal. Transgenic animals also include inducible transgenic animals, such as those described in, for example, Chan I. T., et al. (2004) J Clin Invest. 113(4):528-38 and Chin L. et al (1999) Nature 400(6743):468-72.

[0212] A transgenic animal of the invention can be created by introducing a nucleic acid encoding a polypeptide corresponding to a marker of the invention into the male pronuclei of a fertilized oocyte, e.g., by microinjection, retroviral infection, and allowing the oocyte to develop in a pseudopregnant female foster animal. Intronic sequences and polyadenylation signals can also be included in the transgene to increase the efficiency of expression of the transgene. A tissue-specific regulatory sequence(s) can be operably linked to the transgene to direct expression of the polypeptide of the invention to particular cells. Methods for generating transgenic animals via embryo manipulation and microinjection, particularly animals such as mice, have become conventional in the art and are described, for example, in U.S. Pat. Nos. 4,736,866 and 4,870,009, U.S. Pat. No. 4,873,191 and in Hogan, Manipulating the Mouse Embryo, Cold Spring Harbor Laboratory Press, Cold Spring Harbor, N.Y., 1986. Similar methods are used for production of other transgenic animals. A transgenic founder animal can be identified based upon the presence of the transgene in its genome and/or expression of mRNA encoding the transgene in tissues or cells of the animals. A transgenic founder animal can then be used to breed additional animals carrying the transgene. Moreover, transgenic animals carrying the transgene can further be bred to other transgenic animals carrying other transgenes, and will be appreciated by the skilled artisan to be required in order to generate transgenic animals carrying conditional alleles.

[0213] Clones of the non-human transgenic animals described herein can also be produced according to the methods described in Wilmut et al. (1997) Nature 385:810-813 and PCT Publication NOS. WO 97/07668 and WO 97/07669.

### VI. METHODS OF TREATMENT

[0214] The present invention provides for both prophylactic and therapeutic methods of treating a subject, e.g., a human, who has or is at risk of (or susceptible to) a neurological disease, disorder, or condition. As used herein, “treatment” of a subject includes the application or administration of a therapeutic agent to a subject, or application or administration of a therapeutic agent to a cell or tissue from a subject, who has a disease or disorder, has a symptom of a disease or disorder, or is at risk of (or susceptible to) a disease or disorder, with the purpose of curing, inhibiting, healing, alleviating, relieving, altering, remedying, ameliorating, improving, or affecting the disease or disorder, the symptom of the disease or disorder, or the risk of (or susceptibility to) the disease or disorder. As used herein, a “therapeutic agent” or “compound” includes, but is not limited to, small molecules, peptides, peptidomimetics, polypeptides, RNA interfering agents, e.g., siRNA molecules, antibodies, ribozymes, and antisense oligonucleotides.

[0215] As described herein, a neurological disease, disorder, or condition in a subject is associated with a change, e.g., an increase and/or a decrease in the amount and/or activity, or a change in the structure of one or more markers listed in Table 2. While, as discussed above, some of these changes in amount, structure, and/or activity, result from occurrence of the a neurological disease, disorder, or condition, others of these changes induce, maintain, and promote the diseased state of cells. Thus, a neurological disease, disorder, or condition, characterized by an increase in the amount and/or activity, or a change in the structure, of one or more markers listed in Table 2 (e.g., a marker that is shown to be increased in a neurological disease, disorder, or condition), can be inhibited by inhibiting amount, e.g., expression or protein level, and/or activity of those markers. Likewise, a neurological disease, disorder, or condition characterized by a decrease in the amount and/or activity, or a change in the structure, of one or more markers listed in Table 2 (e.g., a marker that is shown to be decreased in a neurological disease, disorder, or condition), can be inhibited by enhancing amount, e.g., expression or protein level, and/or activity of those markers.

[0216] Accordingly, another aspect of the invention pertains to methods for treating a subject suffering from a neurological disease, disorder, or condition. These methods involve administering to a subject a compound which modulates the amount and/or activity of one or more markers of the invention. For example, methods of treatment or prevention of a neurological disease, disorder, or condition include administering to a subject a compound which decreases the amount and/or activity of one or more markers listed in Table 2 (e.g., a marker that was shown to be increased in a neurological disease, disorder, or condition). Compounds, e.g., antagonists, which may be used to inhibit amount and/or activity of a marker listed in Table 2, to thereby treat or prevent a neurological disease, disorder, or condition include antibodies (e.g., conjugated antibodies), small molecules, RNA interfering agents, e.g., siRNA molecules, ribozymes, and antisense oligonucleotides. In one embodiment, an antibody used for treatment is conjugated to a toxin, a chemotherapeutic agent, or radioactive particles.

[0217] Methods of treatment or prevention of a neurological disease, disorder, or condition also include administering to a subject a compound which increases the amount and/or activity of one or more markers listed in Table 2 (e.g., a marker that was shown to be decreased in a neurological disease, disorder, or condition). Compounds, e.g., agonists, which may be used to increase expression or activity of a marker listed in Table 2, to thereby treat or prevent a neurological disease, disorder, or condition include small molecules, peptides, peptoids, peptidomimetics, and polypeptides.

[0218] Small molecules used in the methods of the invention include those which inhibit a protein-protein interaction and thereby either increase or decrease marker amount and/or activity. Furthermore, modulators, e.g., small molecules, which cause re-expression of silenced genes, e.g., tumor suppressors, are also included herein. For example, such molecules include compounds which interfere with DNA binding or methyltransferase activity.

[0219] An aptamer may also be used to modulate, e.g., increase or inhibit expression or activity of a marker of the invention to thereby treat, prevent or inhibit a neurological disease, disorder, or condition. Aptamers are DNA or RNA molecules that have been selected from random pools based on their ability to bind other molecules. Aptamers may be selected which bind nucleic acids or proteins.

### VII. SCREENING ASSAYS

[0220] The invention also provides methods (also referred to herein as “screening assays”) for identifying modulators, i.e., candidate or test compounds or agents (e.g., proteins, peptides, peptidomimetics, peptoids, small molecules or other drugs) which (a) bind to the marker, or (b) have a modulatory (e.g., stimulatory or inhibitory) effect on the activity of the marker or, more specifically, (c) have a modulatory effect on the interactions of the marker with one or more of its natural substrates (e.g., peptide, protein, hormone, co-factor, or nucleic acid), or (d) have a modulatory effect on the expression of the marker. Such assays typically comprise a reaction between the marker and one or more assay components. The other components may be either the test compound itself, or a combination of test compound and a natural binding partner of the marker. Compounds identified via assays such as those described herein may be useful, for example, for modulating, e.g., inhibiting, ameliorating, treating, or preventing a neurological disease, disorder, or condition.

[0221] The test compounds of the present invention may be obtained from any available source, including systematic libraries of natural and/or synthetic compounds. Test compounds may also be obtained by any of the numerous approaches in combinatorial library methods known in the art, including: biological libraries; peptoid libraries (libraries of molecules having the functionalities of peptides, but with a novel, non-peptide backbone which are resistant to enzymatic degradation but which nevertheless remain bioactive; see, e.g., Zuckermann et al., 1994, J. Med. Chem. 37:2678-85); spatially addressable parallel solid phase or solution phase libraries; synthetic library methods requiring deconvolution; the ‘one-bead one-compound’ library method; and synthetic library methods using affinity chromatography selection. The biological library and peptoid library approaches are limited to peptide libraries, while the other four approaches are applicable to peptide, non-peptide oligomer or small molecule libraries of compounds (Lam, 1997, Anticancer Drug Des. 12:145).

[0222] Examples of methods for the synthesis of molecular libraries can be found in the art, for example in: DeWitt et al. (1993) Proc. Natl. Acad. Sci. U.S.A. 90:6909; Erb et al. (1994) Proc. Natl. Acad. Sci. USA 91:11422; Zuckermann et al. (1994). J. Med. Chem. 37:2678; Cho et al. (1993) Science 261:1303; Carrell et al. (1994) Angew. Chem. Int. Ed. Engl. 33:2059; Carell et al. (1994) Angew. Chem. Int. Ed. Engl. 33:2061; and in Gallop et al. (1994) J. Med. Chem. 37:1233.

Libraries of compounds may be presented in solution (e.g., Houghten, 1992, Biotechniques 13:412-421), or on beads (Lam, 1991, Nature 354:82-84), chips (Fodor, 1993, Nature 364:555-556), bacteria and/or spores, (Ladner, U.S. Pat. No. 5,223,409), plasmids (Cull et al, 1992, Proc Natl Acad Sci USA 89:1865-1869) or on phage (Scott and Smith, 1990, Science 249:386-390; Devlin, 1990, Science 249:404-406; Cwirla et al, 1990, Proc. Natl. Acad. Sci. 87:6378-6382; Felici, 1991, J. Mol. Biol. 222:301-310; Ladner, supra.).

[0223] In one embodiment, the invention provides assays for screening candidate or test compounds which are substrates of a marker or biologically active portion thereof. In another embodiment, the invention provides assays for screening candidate or test compounds which bind to a marker or biologically active portion thereof. Determining the ability of the test compound to directly bind to a marker can be accomplished, for example, by coupling the compound with a radioisotope or enzymatic label such that binding of the compound to the marker can be determined by detecting the labeled marker compound in a complex. For example, compounds (e.g., marker substrates) can be labeled with ¹²⁵I, ³⁵S, ¹⁴C, or ³H, either directly or indirectly, and the radioisotope detected by direct counting of radioemission or by scintillation counting. Alternatively, assay components can be enzymatically labeled with, for example, horseradish peroxidase, alkaline phosphatase, or luciferase, and the enzymatic label detected by determination of conversion of an appropriate substrate to product.

[0224] In another embodiment, the invention provides assays for screening candidate or test compounds which modulate the activity of a marker or a biologically active portion thereof. In all likelihood, the marker can, in vivo, interact with one or more molecules, such as, but not limited to, peptides, proteins, hormones, cofactors and nucleic acids. For the purposes of this discussion, such cellular and extracellular molecules are referred to herein as “binding partners” or marker “substrate”.

[0225] One necessary embodiment of the invention in order to facilitate such screening is the use of the marker to identify its natural in vivo binding partners. There are many ways to accomplish this which are known to one skilled in the art. One example is the use of the marker protein as “bait protein” in a two-hybrid assay or three-hybrid assay (see, e.g., U.S. Pat. No. 5,283,317; Zervos et al, 1993, Cell 72:223-232; Madura et al, 1993, J. Biol. Chem. 268:12046-12054; Bartel et al, 1993, Biotechniques 14:920-924; Iwabuchi et al, 1993 Oncogene 8:1693-1696; Brent WO94/10300) in order to identify other proteins which bind to or interact with the marker (binding partners) and, therefore, are possibly involved in the natural function of the marker. Such marker binding partners are also likely to be involved in the propagation of signals by the marker or downstream elements of a marker-mediated signaling pathway. Alternatively, such marker binding partners may also be found to be inhibitors of the marker.

[0226] The two-hybrid system is based on the modular nature of most transcription factors, which consist of separable DNA-binding and activation domains. Briefly, the assay utilizes two different DNA constructs. In one construct, the gene that encodes a marker protein fused to a gene encoding the DNA binding domain of a known transcription factor (e.g., GAL-4). In the other construct, a DNA sequence, from a library of DNA sequences, that encodes an unidentified protein (“prey” or “sample”) is fused to a gene that codes for the activation domain of the known transcription factor. If the “bait” and the “prey” proteins are able to interact, in vivo, forming a marker-dependent complex, the DNA-binding and activation domains of the transcription factor are brought into close proximity. This proximity allows transcription of a reporter gene (e.g., LacZ) which is operably linked to a transcriptional regulatory site responsive to the transcription factor. Expression of the reporter gene can be readily detected and cell colonies containing the functional transcription factor can be isolated and used to obtain the cloned gene which encodes the protein which interacts with the marker protein.

[0227] In a further embodiment, assays may be devised through the use of the invention for the purpose of identifying compounds which modulate (e.g., affect either positively or negatively) interactions between a marker and its substrates and/or binding partners. Such compounds can include, but are not limited to, molecules such as antibodies, peptides, hormones, oligonucleotides, nucleic acids, and analogs thereof. Such compounds may also be obtained from any available source, including systematic libraries of natural and/or synthetic compounds. The preferred assay components for use in this embodiment is a cancer, marker identified herein, the known binding partner and/or substrate of same, and the test compound. Test compounds can be supplied from any source.

[0228] The basic principle of the assay systems used to identify compounds that interfere with the interaction between the marker and its binding partner involves preparing a reaction mixture containing the marker and its binding partner under conditions and for a time sufficient to allow the two products to interact and bind, thus forming a complex. In order to test an agent for inhibitory activity, the reaction mixture is prepared in the presence and absence of the test compound. The test compound can be initially included in the reaction mixture, or can be added at a time subsequent to the addition of the marker and its binding partner. Control reaction mixtures are incubated without the test compound or with a placebo. The formation of any complexes between the marker and its binding partner is then detected. The formation of a complex in the control reaction, but less or no such formation in the reaction mixture containing the test compound, indicates that the compound interferes with the interaction of the marker and its binding partner. Conversely, the formation of more complex in the presence of compound than in the control reaction indicates that the compound may enhance interaction of the marker and its binding partner. The assay for compounds that interfere with the interaction of the marker with its binding partner may be conducted in a heterogeneous or homogeneous format. Heterogeneous assays involve anchoring either the marker or its binding partner onto a solid phase and detecting complexes anchored to the solid phase at the end of the reaction. In homogeneous assays, the entire reaction is carried out in a liquid phase. In either approach, the order of addition of reactants can be varied to obtain different information about the compounds being tested. For example, test compounds that interfere with the interaction between the markers and the binding partners (e.g., by competition) can be identified by conducting the reaction in the presence of the test substance, i.e., by adding the test substance to the reaction mixture prior to or simultaneously with the marker and its interactive binding partner. Alternatively, test compounds that disrupt preformed complexes, e.g., compounds with higher binding constants that displace one of the components from the complex, can be tested by adding the test compound to the reaction mixture after complexes have been formed. The various formats are briefly described below.

[0229] In a heterogeneous assay system, either the marker or its binding partner is anchored onto a solid surface or matrix, while the other corresponding non-anchored component may be labeled, either directly or indirectly. In practice, microtitre plates are often utilized for this approach. The anchored species can be immobilized by a number of methods, either non-covalent or covalent, that are typically well known to one who practices the art. Non-covalent attachment can often be accomplished simply by coating the solid surface with a solution of the marker or its binding partner and drying. Alternatively, an immobilized antibody specific for the assay component to be anchored can be used for this purpose. Such surfaces can often be prepared in advance and stored.

[0230] In related embodiments, a fusion protein can be provided which adds a domain that allows one or both of the assay components to be anchored to a matrix. For example, glutathione-S-transferase/marker fusion proteins or glutathione-S-transferase/binding partner can be adsorbed onto glutathione sepharose beads (Sigma Chemical, St. Louis, Mo.) or glutathione derivatized microtiter plates, which are then combined with the test compound or the test compound and either the non-adsorbed marker or its binding partner, and the mixture incubated under conditions conducive to complex formation (e.g., physiological conditions). Following incubation, the beads or microtiter plate wells are washed to remove any unbound assay components, the immobilized complex assessed either directly or indirectly, for example, as described above. Alternatively, the complexes can be dissociated from the matrix, and the level of marker binding or activity determined using standard techniques.

Other techniques for immobilizing proteins on matrices can also be used in the screening assays of the invention. For example, either a marker or a marker binding partner can be immobilized utilizing conjugation of biotin and streptavidin. Biotinylated marker protein or target molecules can be prepared from biotin-NHS (N-hydroxy-succinimide) using techniques known in the art (e.g., biotinylation kit, Pierce Chemicals, Rockford, Ill.), and immobilized in the wells of streptavidin-coated 96 well plates (Pierce Chemical). In certain embodiments, the protein-immobilized surfaces can be prepared in advance and stored.

[0231] In order to conduct the assay, the corresponding partner of the immobilized assay component is exposed to the coated surface with or without the test compound. After the reaction is complete, unreacted assay components are removed (e.g., by washing) and any complexes formed will remain immobilized on the solid surface. The detection of complexes anchored on the solid surface can be accomplished in a number of ways. Where the non-immobilized component is pre-labeled, the detection of label immobilized on the surface indicates that complexes were formed. Where the non-immobilized component is not pre-labeled, an indirect label can be used to detect complexes anchored on the surface; e.g., using a labeled antibody specific for the initially non-immobilized species (the antibody, in turn, can be directly labeled or indirectly labeled with, e.g., a labeled anti-Ig antibody). Depending upon the order of addition of reaction components, test compounds which modulate (inhibit or enhance) complex formation or which disrupt preformed complexes can be detected.

[0232] In an alternate embodiment of the invention, a homogeneous assay may be used. This is typically a reaction, analogous to those mentioned above, which is conducted in a liquid phase in the presence or absence of the test compound. The formed complexes are then separated from unreacted components, and the amount of complex formed is determined. As mentioned for heterogeneous assay systems, the order of addition of reactants to the liquid phase can yield information about which test compounds modulate (inhibit or enhance) complex formation and which disrupt preformed complexes.

[0233] In such a homogeneous assay, the reaction products may be separated from unreacted assay components by any of a number of standard techniques, including but not limited to: differential centrifugation, chromatography, electrophoresis and immunoprecipitation. In differential centrifugation, complexes of molecules may be separated from uncomplexed molecules through a series of centrifugal steps, due to the different sedimentation equilibria of complexes based on their different sizes and densities (see, for example, Rivas, G., and Minton, A. P., Trends Biochem Sci 1993 August; 18(8):284-7). Standard chromatographic techniques may also be utilized to separate complexed molecules from uncomplexed ones. For example, gel filtration chromatography separates molecules based on size, and through the utilization of an appropriate gel filtration resin in a column format, for example, the relatively larger complex may be separated from the relatively smaller uncomplexed components. Similarly, the relatively different charge properties of the complex as compared to the uncomplexed molecules may be exploited to differentially separate the complex from the remaining individual reactants, for example through the use of ion-exchange chromatography resins. Such resins and chromatographic techniques are well known to one skilled in the art (see, e.g., Heegaard, 1998, J Mol. Recognit. 11:141-148; Hage and Tweed, 1997, J. Chromatogr. B. Biomed. Sci. Appl., 699:499-525). Gel electrophoresis may also be employed to separate complexed molecules from unbound species (see, e.g., Ausubel et al (eds.), In: Current Protocols in Molecular Biology, J. Wiley & Sons, New York. 1999). In this technique, protein or nucleic acid complexes are separated based on size or charge, for example. In order to maintain the binding interaction during the electrophoretic process, nondenaturing gels in the absence of reducing agent are typically preferred, but conditions appropriate to the particular interactants will be well known to one skilled in the art. Immunoprecipitation is another common technique utilized for the isolation of a protein-protein complex from solution (see, e.g., Ausubel et al (eds.), In: Current Protocols in Molecular Biology, J. Wiley & Sons, New York. 1999). In this technique, all proteins binding to an antibody specific to one of the binding molecules are precipitated from solution by conjugating the antibody to a polymer bead that may be readily collected by centrifugation. The bound assay components are released from the beads (through a specific proteolysis event or other technique well known in the art which will not disturb the protein-protein interaction in the complex), and a second immunoprecipitation step is performed, this time utilizing antibodies specific for the correspondingly different interacting assay component. In this manner, only formed complexes should remain attached to the beads. Variations in complex formation in both the presence and the absence of a test compound can be compared, thus offering information about the ability of the compound to modulate interactions between the marker and its binding partner.

[0234] Also within the scope of the present invention are methods for direct detection of interactions between the marker and its natural binding partner and/or a test compound in a homogeneous or heterogeneous assay system without further sample manipulation. For example, the technique of fluorescence energy transfer may be utilized (see, e.g., Lakowicz et al, U.S. Pat. No. 5,631,169; Stavrianopoulos et al, U.S. Pat. No. 4,868,103). Generally, this technique involves the addition of a fluorophore label on a first ‘donor’ molecule (e.g., marker or test compound) such that its emitted fluorescent energy will be absorbed by a fluorescent label on a second, ‘acceptor’ molecule (e.g., marker or test compound), which in turn is able to fluoresce due to the absorbed energy. Alternately, the ‘donor’ protein molecule may simply utilize the natural fluorescent energy of tryptophan residues. Labels are chosen that emit different wavelengths of light, such that the ‘acceptor’ molecule label may be differentiated from that of the ‘donor’. Since the efficiency of energy transfer between the labels is related to the distance separating the molecules, spatial relationships between the molecules can be assessed. In a situation in which binding occurs between the molecules, the fluorescent emission of the ‘acceptor’ molecule label in the assay should be maximal. An FET binding event can be conveniently measured through standard fluorometric detection means well known in the art (e.g., using a fluorimeter). A test substance which either enhances or hinders participation of one of the species in the preformed complex will result in the generation of a signal variant to that of background. In this way, test substances that modulate interactions between a marker and its binding partner can be identified in controlled assays.

In another embodiment, modulators of marker expression are identified in a method wherein a cell is contacted with a candidate compound and the expression of mRNA or protein, corresponding to a marker in the cell, is determined. The level of expression of mRNA or protein in the presence of the candidate compound is compared to the level of expression of mRNA or protein in the absence of the candidate compound. The candidate compound can then be identified as a modulator of marker expression based on this comparison. For example, when expression of marker mRNA or protein is greater (statistically significantly greater) in the presence of the candidate compound than in its absence, the candidate compound is identified as a stimulator of marker mRNA or protein expression. Conversely, when expression of marker mRNA or protein is less (statistically significantly less) in the presence of the candidate compound than in its absence, the candidate compound is identified as an inhibitor of marker mRNA or protein expression. The level of marker mRNA or protein expression in the cells can be determined by methods described herein for detecting marker mRNA or protein.

[0235] In another aspect, the invention pertains to a combination of two or more of the assays described herein. For example, a modulating agent can be identified using a cell-based or a cell free assay, and the ability of the agent to modulate the activity of a marker protein can be further confirmed in vivo, e.g., in a whole animal model for a neurological disease, disorder, or condition, cancer, cellular transformation and/or tumorigenesis. An animal model for neurological disease, disorder, or condition is described in, for example, Ding, H., et al. (2000) Neurosurgical Focus 8(4), the contents of which are expressly incorporated herein by reference. Additional animal based models of neurological disease, disorders and conditions are well known in the art and include, for example, those described in Weiss, W. A. and Banerjee, A. (2004) Semin Cancer Biol. 14(1):71-7; Hickey M A and Chesselet M F. (2003) Cytogenet Genome Res. 100(1-4):276-86; and Hafezparast M, et al (2002) Lancet Neurol. 1(4):215-24. Animal models described in, for example, Chin L. et al (1999) Nature 400(6743):468-72, may also be used in the methods of the invention.

[0236] This invention further pertains to novel agents identified by the above-described screening assays. Accordingly, it is within the scope of this invention to further use an agent identified as described herein in an appropriate animal model. For example, an agent identified as described herein (e.g., a marker modulating agent, a small molecule, an antisense marker nucleic acid molecule, a ribozyme, a marker-specific antibody, or fragment thereof, a marker protein, a marker nucleic acid molecule, an RNA interfering agent, e.g., an siRNA molecule targeting a marker of the invention, or a marker-binding partner) can be used in an animal model to determine the efficacy, toxicity, or side effects of treatment with such an agent. Alternatively, an agent identified as described herein can be used in an animal model to determine the mechanism of action of such an agent. Furthermore, this invention pertains to uses of novel agents identified by the above-described screening assays for treatments as described herein.

### VIII. PHARMACEUTICAL COMPOSITIONS

[0237] The small molecules, peptides, peptoids, peptidomimetics, polypeptides, RNA interfering agents, e.g., siRNA molecules, antibodies, ribozymes, and antisense oligonucleotides (also referred to herein as “active compounds” or “compounds”) corresponding to a marker of the invention can be incorporated into pharmaceutical compositions suitable for administration. Such compositions typically comprise the small molecules, peptides, peptoids, peptidomimetics, polypeptides, RNA interfering agents, e.g., siRNA molecules, antibodies, ribozymes, or antisense oligonucleotides and a pharmaceutically acceptable carrier. As used herein the language “pharmaceutically acceptable carrier” is intended to include any and all solvents, dispersion media, coatings, antibacterial and antifungal agents, isotonic and absorption delaying agents, and the like, compatible with pharmaceutical administration. The use of such media and agents for pharmaceutically active substances is well known in the art. Except insofar as any conventional media or agent is incompatible with the active compound, use thereof in the compositions is contemplated. Supplementary active compounds can also be incorporated into the compositions.

[0238] The invention includes methods for preparing pharmaceutical compositions for modulating the expression or activity of a polypeptide or nucleic acid corresponding to a marker of the invention. Such methods comprise formulating a pharmaceutically acceptable carrier with an agent which modulates expression or activity of a polypeptide or nucleic acid corresponding to a marker of the invention. Such compositions can further include additional active agents. Thus, the invention further includes methods for preparing a pharmaceutical composition by formulating a pharmaceutically acceptable carrier with an agent which modulates expression or activity of a polypeptide or nucleic acid corresponding to a marker of the invention and one or more additional active compounds.

[0239] It is understood that appropriate doses of small molecule agents and protein or polypeptide agents depends upon a number of factors within the knowledge of the ordinarily skilled physician, veterinarian, or researcher. The dose(s) of these agents will vary, for example, depending upon the identity, size, and condition of the subject or sample being treated, further depending upon the route by which the composition is to be administered, if applicable, and the effect which the practitioner desires the agent to have upon the nucleic acid molecule or polypeptide of the invention. Small molecules include, but are not limited to, peptides, peptidomimetics, amino acids, amino acid analogs, polynucleotides, polynucleotide analogs, nucleotides, nucleotide analogs, organic or inorganic compounds (i.e., including heteroorganic and organometallic compounds) having a molecular weight less than about 10,000 grams per mole, organic or inorganic compounds having a molecular weight less than about 5,000 grams per mole, organic or inorganic compounds having a molecular weight less than about 1,000 grams per mole, organic or inorganic compounds having a molecular weight less than about 500 grams per mole, and salts, esters, and other pharmaceutically acceptable forms of such compounds.

[0240] Exemplary doses of a small molecule include milligram or microgram amounts per kilogram of subject or sample weight (e.g. about 1 microgram per kilogram to about 500 milligrams per kilogram, about 100 micrograms per kilogram to about 5 milligrams per kilogram, or about 1 microgram per kilogram to about 50 micrograms per kilogram).

[0241] As defined herein, a therapeutically effective amount of an RNA interfering agent, e.g., siRNA, (i.e., an effective dosage) ranges from about 0.001 to 3,000 mg/kg body weight, preferably about 0.01 to 2500 mg/kg body weight, more preferably about 0.1 to 2000, about 0.1 to 1000 mg/kg body weight, 0.1 to 500 mg/kg body weight, 0.1 to 100 mg/kg body weight, 0.1 to 50 mg/kg body weight, 0.1 to 25 mg/kg body weight, and even more preferably about 1 to 10 mg/kg, 2 to 9 mg/kg, 3 to 8 mg/kg, 4 to 7 mg/kg, or 5 to 6 mg/kg body weight. Treatment of a subject with a therapeutically effective amount of an RNA interfering agent can include a single treatment or, preferably, can include a series of treatments. In a preferred example, a subject is treated with an RNA interfering agent in the range of between about 0.1 to 20 mg/kg body weight, one time per week for between about 1 to 10 weeks, preferably between 2 to 8 weeks, more preferably between about 3 to 7 weeks, and even more preferably for about 4, 5, or 6 weeks.

[0242] Exemplary doses of a protein or polypeptide include gram, milligram or microgram amounts per kilogram of subject or sample weight (e.g. about 1 microgram per kilogram to about 5 grams per kilogram, about 100 micrograms per kilogram to about 500 milligrams per kilogram, or about 1 milligram per kilogram to about 50 milligrams per kilogram). It is furthermore understood that appropriate doses of one of these agents depend upon the potency of the agent with respect to the expression or activity to be modulated. Such appropriate doses can be determined using the assays described herein. When one or more of these agents is to be administered to an animal (e.g. a human) in order to modulate expression or activity of a polypeptide or nucleic acid of the invention, a physician, veterinarian, or researcher can, for example, prescribe a relatively low dose at first, subsequently increasing the dose until an appropriate response is obtained. In addition, it is understood that the specific dose level for any particular animal subject will depend upon a variety of factors including the activity of the specific agent employed, the age, body weight, general health, gender, and diet of the subject, the time of administration, the route of administration, the rate of excretion, any drug combination, and the degree of expression or activity to be modulated.

[0243] A pharmaceutical composition of the invention is formulated to be compatible with its intended route of administration. Examples of routes of administration include parenteral, e.g., intravenous, intradermal, subcutaneous, oral (e.g., inhalation), transdermal (topical), transmucosal, and rectal administration. Solutions or suspensions used for parenteral, intradermal, or subcutaneous application can include the following components: a sterile diluent such as water for injection, saline solution, fixed oils, polyethylene glycols, glycerine, propylene glycol or other synthetic solvents; antibacterial agents such as benzyl alcohol or methyl parabens; antioxidants such as ascorbic acid or sodium bisulfite; chelating agents such as ethylenediamine-tetraacetic acid; buffers such as acetates, citrates or phosphates and agents for the adjustment of tonicity such as sodium chloride or dextrose. pH can be adjusted with acids or bases, such as hydrochloric acid or sodium hydroxide. The parenteral preparation can be enclosed in ampules, disposable syringes or multiple dose vials made of glass or plastic.

[0244] Pharmaceutical compositions suitable for injectable use include sterile aqueous solutions (where water soluble) or dispersions and sterile powders for the extemporaneous preparation of sterile injectable solutions or dispersions. For intravenous administration, suitable carriers include physiological saline, bacteriostatic water, Cremophor EL (BASF; Parsippany, N.J.) or phosphate buffered saline (PBS). In all cases, the composition must be sterile and should be fluid to the extent that easy syringability exists. It must be stable under the conditions of manufacture and storage and must be preserved against the contaminating action of microorganisms such as bacteria and fungi. The carrier can be a solvent or dispersion medium containing, for example, water, ethanol, polyol (for example, glycerol, propylene glycol, and liquid polyethylene glycol, and the like), and suitable mixtures thereof. The proper fluidity can be maintained, for example, by the use of a coating such as lecithin, by the maintenance of the required particle size in the case of dispersion and by the use of surfactants. Prevention of the action of microorganisms can be achieved by various antibacterial and antifungal agents, for example, parabens, chlorobutanol, phenol, ascorbic acid, thimerosal, and the like. In many cases, it will be preferable to include isotonic agents, for example, sugars, polyalcohols such as mannitol, sorbitol, or sodium chloride in the composition. Prolonged absorption of the injectable compositions can be brought about by including in the composition an agent which delays absorption, for example, aluminum monostearate and gelatin.

[0245] Sterile injectable solutions can be prepared by incorporating the active compound (e.g., a polypeptide or antibody) in the required amount in an appropriate solvent with one or a combination of ingredients enumerated above, as required, followed by filtered sterilization. Generally, dispersions are prepared by incorporating the active compound into a sterile vehicle which contains a basic dispersion medium, and then incorporating the required other ingredients from those enumerated above. In the case of sterile powders for the preparation of sterile injectable solutions, the preferred methods of preparation are vacuum drying and freeze-drying which yields a powder of the active ingredient plus any additional desired ingredient from a previously sterile-filtered solution thereof.

[0246] Oral compositions generally include an inert diluent or an edible carrier. They can be enclosed in gelatin capsules or compressed into tablets. For the purpose of oral therapeutic administration, the active compound can be incorporated with excipients and used in the form of tablets, troches, or capsules. Oral compositions can also be prepared using a fluid carrier for use as a mouthwash, wherein the compound in the fluid carrier is applied orally and swished and expectorated or swallowed.

[0247] Pharmaceutically compatible binding agents, and/or adjuvant materials can be included as part of the composition. The tablets, pills, capsules, troches, and the like can contain any of the following ingredients, or compounds of a similar nature: a binder such as microcrystalline cellulose, gum tragacanth or gelatin; an excipient such as starch or lactose, a disintegrating agent such as alginic acid, Primogel, or corn starch; a lubricant such as magnesium stearate or Sterotes; a glidant such as colloidal silicon dioxide; a sweetening agent such as sucrose or saccharin; or a flavoring agent such as peppermint, methyl salicylate, or orange flavoring.

[0248] For administration by inhalation, the compounds are delivered in the form of an aerosol spray from a pressurized container or dispenser which contains a suitable propellant, e.g., a gas such as carbon dioxide, or a nebulizer.

[0249] Systemic administration can also be by transmucosal or transdermal means. For transmucosal or transdermal administration, penetrants appropriate to the barrier to be permeated are used in the formulation. Such penetrants are generally known in the art, and include, for example, for transmucosal administration, detergents, bile salts, and fusidic acid derivatives. Transmucosal administration can be accomplished through the use of nasal sprays or suppositories. For transdermal administration, the active compounds are formulated into ointments, salves, gels, or creams as generally known in the art.

[0250] The compounds can also be prepared in the form of suppositories (e.g., with conventional suppository bases such as cocoa butter and other glycerides) or retention enemas for rectal delivery.

[0251] In one embodiment, the active compounds are prepared with carriers that will protect the compound against rapid elimination from the body, such as a controlled release formulation, including implants and microencapsulated delivery systems. Biodegradable, biocompatible polymers can be used, such as ethylene vinyl acetate, polyanhydrides, polyglycolic acid, collagen, polyorthoesters, and polylactic acid. Methods for preparation of such formulations will be apparent to those skilled in the art. The materials can also be obtained commercially from Alza Corporation and Nova Pharmaceuticals, Inc. Liposomal suspensions (including liposomes having monoclonal antibodies incorporated therein or thereon) can also be used as pharmaceutically acceptable carriers. These can be prepared according to methods known to those skilled in the art, for example, as described in U.S. Pat. No. 4,522,811.

[0252] It is especially advantageous to formulate oral or parenteral compositions in dosage unit form for ease of administration and uniformity of dosage. Dosage unit form as used herein refers to physically discrete units suited as unitary dosages for the subject to be treated; each unit containing a predetermined quantity of active compound calculated to produce the desired therapeutic effect in association with the required pharmaceutical carrier. The specification for the dosage unit forms of the invention are dictated by and directly dependent on the unique characteristics of the active compound and the particular therapeutic effect to be achieved, and the limitations inherent in the art of compounding such an active compound for the treatment of individuals.

[0253] For antibodies, the preferred dosage is 0.1 mg/kg to 100 mg/kg of body weight (generally 10 mg/kg to 20 mg/kg). If the antibody is to act in the brain, a dosage of 50 mg/kg to 100 mg/kg is usually appropriate. Generally, partially human antibodies and fully human antibodies have a longer half-life within the human body than other antibodies. Accordingly, lower dosages and less frequent administration is often possible. Modifications such as lipidation can be used to stabilize antibodies and to enhance uptake and tissue penetration (e.g., into the epithelium). A method for lipidation of antibodies is described by Cruikshank et al. (1997) J. Acquired Immune Deficiency Syndromes and Human Retrovirology 14:193.

[0254] The nucleic acid molecules corresponding to a marker of the invention can be inserted into vectors and used as gene therapy vectors. Gene therapy vectors can be delivered to a subject by, for example, intravenous injection, local administration (U.S. Pat. No. 5,328,470), or by stereotactic injection (see, e.g., Chen et al., 1994, Proc. Natl. Acad. Sci. USA 91:3054-3057). The pharmaceutical preparation of the gene therapy vector can include the gene therapy vector in an acceptable diluent, or can comprise a slow release matrix in which the gene delivery vehicle is imbedded. Alternatively, where the complete gene delivery vector can be produced intact from recombinant cells, e.g. retroviral vectors, the pharmaceutical preparation can include one or more cells which produce the gene delivery system.

[0255] The RNA interfering agents, e.g., siRNAs used in the methods of the invention can be inserted into vectors. These constructs can be delivered to a subject by, for example, intravenous injection, local administration (see U.S. Pat. No. 5,328,470) or by stereotactic injection (see e.g., Chen et al. (1994) Proc. Natl. Acad. Sci. USA 91:3054-3057). The pharmaceutical preparation of the vector can include the RNA interfering agent, e.g., the siRNA vector in an acceptable diluent, or can comprise a slow release matrix in which the gene delivery vehicle is imbedded. Alternatively, where the complete gene delivery vector can be produced intact from recombinant cells, e.g., retroviral vectors, the pharmaceutical preparation can include one or more cells which produce the gene delivery system.

[0256] The pharmaceutical compositions can be included in a container, pack, or dispenser together with instructions for administration.

### IX. PREDICTIVE MEDICINE

[0257] The present invention also pertains to the field of predictive medicine in which diagnostic assays, prognostic assays, pharmacogenomics, and monitoring clinical trails are used for prognostic (predictive) purposes to thereby treat an individual prophylactically. Accordingly, one aspect of the present invention relates to diagnostic assays for determining the amount, structure, and/or activity of polypeptides or nucleic acids corresponding to one or more markers of the invention, in order to determine whether an individual is at risk of developing a neurological disease, disorder, or condition. Such assays can be used for prognostic or predictive purposes to thereby prophylactically treat an individual prior to the onset of a neurological disease, disorder, or condition.

[0258] The present invention also provides methods of diagnosing tumor grade, e.g., glioma grade, clinical outcome, and prognosis for a subject afflicted with a tumor, e.g., a glioma. For example, the markers of the present invention may be used to determine whether a tumor, e.g., a glioma, is a high grade tumor or a low grade tumor, to predict the responsiveness of a tumor to certain treatment regimens, and to determine the prognosis of a subject with a tumor, e.g., a glioma.

[0259] Yet another aspect of the invention pertains to monitoring the influence of agents (e.g., drugs or other compounds administered either to inhibit a neurological disease, disorder, or condition, or to treat or prevent any other disorder {i.e. in order to understand any carcinogenic effects that such treatment may have}) on the amount, structure, and/or activity of a marker of the invention in clinical trials. These and other agents are described in further detail in the following sections.

[0260] A. Diagnostic Assays

[0261] 1. Methods for Detection of Copy Number

[0262] Methods of evaluating the copy number of a particular marker or chromosomal region are well known to those of skill in the art. The presence or absence of chromosomal gain or loss can be evaluated simply by a determination of copy number of the regions or markers identified herein.

[0263] Methods for evaluating copy number of encoding nucleic acid in a sample include, but are not limited to, hybridization-based assays. For example, one method for evaluating the copy number of encoding nucleic acid in a sample involves a Southern Blot. In a Southern Blot, the genomic DNA (typically fragmented and separated on an electrophoretic gel) is hybridized to a probe specific for the target region. Comparison of the intensity of the hybridization signal from the probe for the target region with control probe signal from analysis of normal genomic DNA (e.g., a non-amplified portion of the same or related cell, tissue, organ, etc.) provides an estimate of the relative copy number of the target nucleic acid.

[0264] An alternative means for determining the copy number is in situ hybridization (e.g., Angerer (1987) Meth. Enzymol 152: 649). Generally, in situ hybridization comprises the following steps: (1) fixation of tissue or biological structure to be analyzed; (2) prehybridization treatment of the biological structure to increase accessibility of target DNA, and to reduce nonspecific binding; (3) hybridization of the mixture of nucleic acids to the nucleic acid in the biological structure or tissue; (4) post-hybridization washes to remove nucleic acid fragments not bound in the hybridization and (5) detection of the hybridized nucleic acid fragments. The reagent used in each of these steps and the conditions for use vary depending on the particular application.

[0265] Preferred hybridization-based assays include, but are not limited to, traditional “direct probe” methods such as Southern blots or in situ hybridization (e.g., FISH), and “comparative probe” methods such as comparative genomic hybridization (CGH), e.g., cDNA-based or oligonucleotide-based CGH. The methods can be used in a wide variety of formats including, but not limited to, substrate (e.g. membrane or glass) bound methods or array-based approaches.

[0266] In a typical in situ hybridization assay, cells are fixed to a solid support, typically a glass slide. If a nucleic acid is to be probed, the cells are typically denatured with heat or alkali. The cells are then contacted with a hybridization solution at a moderate temperature to permit annealing of labeled probes specific to the nucleic acid sequence encoding the protein. The targets (e.g., cells) are then typically washed at a predetermined stringency or at an increasing stringency until an appropriate signal to noise ratio is obtained.

[0267] The probes are typically labeled, e.g., with radioisotopes or fluorescent reporters. Preferred probes are sufficiently long so as to specifically hybridize with the target nucleic acid(s) under stringent conditions. The preferred size range is from about 200 bases to about 1000 bases.

[0268] In some applications it is necessary to block the hybridization capacity of repetitive sequences. Thus, in some embodiments, tRNA, human genomic DNA, or Cot-I DNA is used to block non-specific hybridization.

[0269] In CGH methods, a first collection of nucleic acids (e.g. from a sample, e.g., a possible tumor) is labeled with a first label, while a second collection of nucleic acids (e.g. a control, e.g., from a healthy cell/tissue) is labeled with a second label. The ratio of hybridization of the nucleic acids is determined by the ratio of the two (first and second) labels binding to each fiber in the array. Where there are chromosomal deletions or multiplications, differences in the ratio of the signals from the two labels will be detected and the ratio will provide a measure of the copy number. Array-based CGH may also be performed with single-color labeling (as opposed to labeling the control and the possible tumor sample with two different dyes and mixing them prior to hybridization, which will yield ratio due to competitive hybridization to probes on the arrays). In single color CGH, the control is labeled and hybridized to one array and absolute signals are read, and the possible tumor sample is labeled and hybridized to a second array (with identical content) and absolute signals are read. Copy number difference is calculated based on absolute signals from the two arrays. Hybridization protocols suitable for use with the methods of the invention are described, e.g., in Albertson (1984) EMBO J. 3: 1227-1234; Pinkel (1988) Proc. Natl. Acad. Sci. USA 85: 9138-9142; EPO Pub. No. 430,402; Methods in Molecular Biology, Vol. 33: In Situ Hybridization Protocols, Choo, ed., Humana Press, Totowa, N.J. (1994), etc. In one embodiment, the hybridization protocol of Pinkel et al. (1998) Nature Genetics 20: 207-211, or of Kallioniemi (1992) Proc. Natl. Acad Sci USA 89:5321-5325 (1992) is used.

[0270] The methods of the invention are particularly well suited to array-based hybridization formats. Array-based CGH is described in U.S. Pat. No. 6,455,258, the contents of which are incorporated herein by reference.

[0271] In still another embodiment, amplification-based assays can be used to measure copy number. In such amplification-based assays, the nucleic acid sequences act as a template in an amplification reaction (e.g., Polymerase Chain Reaction (PCR). In a quantitative amplification, the amount of amplification product will be proportional to the amount of template in the original sample. Comparison to appropriate controls, e.g. healthy tissue, provides a measure of the copy number.

[0272] Methods of “quantitative” amplification are well known to those of skill in the art. For example, quantitative PCR involves simultaneously co-amplifying a known quantity of a control sequence using the same primers. This provides an internal standard that may be used to calibrate the PCR reaction. Detailed protocols for quantitative PCR are provided in Innis et al. (1990) PCR Protocols, A Guide to Methods and Applications, Academic Press, Inc. N.Y.). Measurement of DNA copy number at microsatellite loci using quantitative PCR analysis is described in Ginzonger, et al. (2000) Cancer Research 60:5405-5409. The known nucleic acid sequence for the genes is sufficient to enable one of skill in the art to routinely select primers to amplify any portion of the gene. Fluorogenic quantitative PCR may also be used in the methods of the invention. In fluorogenic quantitative PCR, quantitation is based on amount of fluorescence signals, e.g., TaqMan and sybr green.

[0273] Other suitable amplification methods include, but are not limited to, ligase chain reaction (LCR) (see Wu and Wallace (1989) Genomics 4: 560, Landegren et al. (1988) Science 241: 1077, and Barringer et al. (1990) Gene 89: 117, transcription amplification (Kwoh et al. (1989) Proc. Natl. Acad. Sci. USA 86: 1173), self-sustained sequence replication (Guatelli et al. (1990) Proc. Nat. Acad. Sci. USA 87: 1874), dot PCR, and linker adapter PCR, etc.

[0274] Loss of heterozygosity (LOH) mapping (Wang Z. C. et al. (2004) Cancer Res 64(1):64-71; Seymour, A. B., et al. (1994) Cancer Res 54, 2761-4; Hahn, S. A., et al. (1995) Cancer Res 55, 4670-5; Kimura, M., et al. (1996) Genes Chromosomes Cancer 17, 88-93) may also be used to identify regions of amplification or deletion.

[0275] 2. Methods for Detection of Gene Expression

[0276] Marker expression level can also be assayed as a method for diagnosis of cancer or risk for developing cancer. Expression of a marker of the invention may be assessed by any of a wide variety of well known methods for detecting expression of a transcribed molecule or protein. Non-limiting examples of such methods include immunological methods for detection of secreted, cell-surface, cytoplasmic, or nuclear proteins, protein purification methods, protein function or activity assays, nucleic acid hybridization methods, nucleic acid reverse transcription methods, and nucleic acid amplification methods.

[0277] In preferred embodiments, activity of a particular gene is characterized by a measure of gene transcript (e.g. mRNA), by a measure of the quantity of translated protein, or by a measure of gene product activity. Marker expression can be monitored in a variety of ways, including by detecting mRNA levels, protein levels, or protein activity, any of which can be measured using standard techniques. Detection can involve quantification of the level of gene expression (e.g., genomic DNA, cDNA, mRNA, protein, or enzyme activity), or, alternatively, can be a qualitative assessment of the level of gene expression, in particular in comparison with a control level. The type of level being detected will be clear from the context.

[0278] Methods of detecting and/or quantifying the gene transcript (mRNA or cDNA made therefrom) using nucleic acid hybridization techniques are known to those of skill in the art (see Sambrook et al. supra). For example, one method for evaluating the presence, absence, or quantity of cDNA involves a Southern transfer as described above. Briefly, the mRNA is isolated (e.g. using an acid guanidinium-phenol-chloroform extraction method, Sambrook et al. supra.) and reverse transcribed to produce cDNA. The cDNA is then optionally digested and run on a gel in buffer and transferred to membranes. Hybridization is then carried out using the nucleic acid probes specific for the target cDNA.

[0279] A general principle of such diagnostic and prognostic assays involves preparing a sample or reaction mixture that may contain a marker, and a probe, under appropriate conditions and for a time sufficient to allow the marker and probe to interact and bind, thus forming a complex that can be removed and/or detected in the reaction mixture. These assays can be conducted in a variety of ways.

[0280] For example, one method to conduct such an assay would involve anchoring the marker or probe onto a solid phase support, also referred to as a substrate, and detecting target marker/probe complexes anchored on the solid phase at the end of the reaction. In one embodiment of such a method, a sample from a subject, which is to be assayed for presence and/or concentration of marker, can be anchored onto a carrier or solid phase support. In another embodiment, the reverse situation is possible, in which the probe can be anchored to a solid phase and a sample from a subject can be allowed to react as an unanchored component of the assay.

[0281] There are many established methods for anchoring assay components to a solid phase. These include, without limitation, marker or probe molecules which are immobilized through conjugation of biotin and streptavidin. Such biotinylated assay components can be prepared from biotin-NHS (N-hydroxy-succinimide) using techniques known in the art (e.g., biotinylation kit, Pierce Chemicals, Rockford, Ill.), and immobilized in the wells of streptavidin-coated 96 well plates (Pierce Chemical). In certain embodiments, the surfaces with immobilized assay components can be prepared in advance and stored.

[0282] Other suitable carriers or solid phase supports for such assays include any material capable of binding the class of molecule to which the marker or probe belongs. Well-known supports or carriers include, but are not limited to, glass, polystyrene, nylon, polypropylene, nylon, polyethylene, dextran, amylases, natural and modified celluloses, polyacrylamides, gabbros, and magnetite.

[0283] In order to conduct assays with the above mentioned approaches, the non-immobilized component is added to the solid phase upon which the second component is anchored. After the reaction is complete, uncomplexed components may be removed (e.g., by washing) under conditions such that any complexes formed will remain immobilized upon the solid phase. The detection of marker/probe complexes anchored to the solid phase can be accomplished in a number of methods outlined herein.

[0284] In a preferred embodiment, the probe, when it is the unanchored assay component, can be labeled for the purpose of detection and readout of the assay, either directly or indirectly, with detectable labels discussed herein and which are well-known to one skilled in the art.

[0285] It is also possible to directly detect marker/probe complex formation without further manipulation or labeling of either component (marker or probe), for example by utilizing the technique of fluorescence energy transfer (see, for example, Lakowicz et al., U.S. Pat. No. 5,631,169; Stavrianopoulos, et al., U.S. Pat. No. 4,868,103). A fluorophore label on the first, ‘donor’ molecule is selected such that, upon excitation with incident light of appropriate wavelength, its emitted fluorescent energy will be absorbed by a fluorescent label on a second ‘acceptor’ molecule, which in turn is able to fluoresce due to the absorbed energy. Alternately, the ‘donor’ protein molecule may simply utilize the natural fluorescent energy of tryptophan residues. Labels are chosen that emit different wavelengths of light, such that the ‘acceptor’ molecule label may be differentiated from that of the ‘donor’. Since the efficiency of energy transfer between the labels is related to the distance separating the molecules, spatial relationships between the molecules can be assessed. In a situation in which binding occurs between the molecules, the fluorescent emission of the ‘acceptor’ molecule label in the assay should be maximal. An FET binding event can be conveniently measured through standard fluorometric detection means well known in the art (e.g., using a fluorimeter).

[0286] In another embodiment, determination of the ability of a probe to recognize a marker can be accomplished without labeling either assay component (probe or marker) by utilizing a technology such as real-time Biomolecular Interaction Analysis (BIA) (see, e.g., Sjolander, S, and Urbaniczky, C., 1991, Anal. Chem. 63:2338-2345 and Szabo et al., 1995, Curr. Opin. Struct. Biol. 5:699-705). As used herein, “BIA” or “surface plasmon resonance” is a technology for studying biospecific interactions in real time, without labeling any of the interactants (e.g., BIAcore). Changes in the mass at the binding surface (indicative of a binding event) result in alterations of the refractive index of light near the surface (the optical phenomenon of surface plasmon resonance (SPR)), resulting in a detectable signal which can be used as an indication of real-time reactions between biological molecules.

[0287] Alternatively, in another embodiment, analogous diagnostic and prognostic assays can be conducted with marker and probe as solutes in a liquid phase. In such an assay, the complexed marker and probe are separated from uncomplexed components by any of a number of standard techniques, including but not limited to: differential centrifugation, chromatography, electrophoresis and immunoprecipitation. In differential centrifugation, marker/probe complexes may be separated from uncomplexed assay components through a series of centrifugal steps, due to the different sedimentation equilibria of complexes based on their different sizes and densities (see, for example, Rivas, G., and Minton, A. P., 1993, Trends Biochem Sci. 18(8):284-7). Standard chromatographic techniques may also be utilized to separate complexed molecules from uncomplexed ones. For example, gel filtration chromatography separates molecules based on size, and through the utilization of an appropriate gel filtration resin in a column format, for example, the relatively larger complex may be separated from the relatively smaller uncomplexed components. Similarly, the relatively different charge properties of the marker/probe complex as compared to the uncomplexed components may be exploited to differentiate the complex from uncomplexed components, for example through the utilization of ion-exchange chromatography resins. Such resins and chromatographic techniques are well known to one skilled in the art (see, e.g., Heegaard, N. H., 1998, J. Mol. Recognit. Winter 11(1-6):141-8; Hage, D. S., and Tweed, S. A. J Chromatogr B Biomed Sci Appl 1997 Oct. 10; 699(1-2):499-525). Gel electrophoresis may also be employed to separate complexed assay components from unbound components (see, e.g., Ausubel et al., ed., Current Protocols in Molecular Biology, John Wiley & Sons, New York, 1987-1999). In this technique, protein or nucleic acid complexes are separated based on size or charge, for example. In order to maintain the binding interaction during the electrophoretic process, non-denaturing gel matrix materials and conditions in the absence of reducing agent are typically preferred. Appropriate conditions to the particular assay and components thereof will be well known to one skilled in the art.

[0288] In a particular embodiment, the level of mRNA corresponding to the marker can be determined both by in situ and by in vitro formats in a biological sample using methods known in the art. The term “biological sample” is intended to include tissues, cells, biological fluids and isolates thereof, isolated from a subject, as well as tissues, cells and fluids present within a subject, e.g., tumor cells. Many expression detection methods use isolated RNA. For in vitro methods, any RNA isolation technique that does not select against the isolation of mRNA can be utilized for the purification of RNA from cells (see, e.g., Ausubel et al., ed., Current Protocols in Molecular Biology, John Wiley & Sons, New York 1987-1999). Additionally, large numbers of tissue samples can readily be processed using techniques well known to those of skill in the art, such as, for example, the single-step RNA isolation process of Chomczynski (1989, U.S. Pat. No. 4,843,155).

[0289] The isolated nucleic acid can be used in hybridization or amplification assays that include, but are not limited to, Southern or Northern analyses, polymerase chain reaction analyses and probe arrays. One preferred diagnostic method for the detection of mRNA levels involves contacting the isolated mRNA with a nucleic acid molecule (probe) that can hybridize to the mRNA encoded by the gene being detected. The nucleic acid probe can be, for example, a full-length cDNA, or a portion thereof, such as an oligonucleotide of at least 7, 15, 30, 50, 100, 250 or 500 nucleotides in length and sufficient to specifically hybridize under stringent conditions to a mRNA or genomic DNA encoding a marker of the present invention. Other suitable probes for use in the diagnostic assays of the invention are described herein. Hybridization of an mRNA with the probe indicates that the marker in question is being expressed.

[0290] In one format, the mRNA is immobilized on a solid surface and contacted with a probe, for example by running the isolated mRNA on an agarose gel and transferring the mRNA from the gel to a membrane, such as nitrocellulose. In an alternative format, the probe(s) are immobilized on a solid surface and the mRNA is contacted with the probe(s), for example, in an Affymetrix gene chip array. A skilled artisan can readily adapt known mRNA detection methods for use in detecting the level of mRNA encoded by the markers of the present invention.

[0291] The probes can be full length or less than the full length of the nucleic acid sequence encoding the protein. Shorter probes are empirically tested for specificity. Preferably nucleic acid probes are 20 bases or longer in length. (See, e.g., Sambrook et al. for methods of selecting nucleic acid probe sequences for use in nucleic acid hybridization.) Visualization of the hybridized portions allows the qualitative determination of the presence or absence of cDNA.

[0292] An alternative method for determining the level of a transcript corresponding to a marker of the present invention in a sample involves the process of nucleic acid amplification, e.g., by rtPCR (the experimental embodiment set forth in Mullis, 1987, U.S. Pat. No. 4,683,202), ligase chain reaction (Barany, 1991, Proc. Natl. Acad. Sci. USA, 88:189-193), self sustained sequence replication (Guatelli et al., 1990, Proc. Natl. Acad. Sci. USA 87:1874-1878), transcriptional amplification system (Kwoh et al., 1989, Proc. Natl. Acad. Sci. USA 86:1173-1177), Q-BetaReplicase (Lizardi et al., 1988, Bio/Technology 6:1197), rolling circle replication (Lizardi et al., U.S. Pat. No. 5,854,033) or any other nucleic acid amplification method, followed by the detection of the amplified molecules using techniques well known to those of skill in the art. Fluorogenic rtPCR may also be used in the methods of the invention. In fluorogenic rtPCR, quantitation is based on amount of fluorescence signals, e.g., TaqMan and sybr green. These detection schemes are especially useful for the detection of nucleic acid molecules if such molecules are present in very low numbers. As used herein, amplification primers are defined as being a pair of nucleic acid molecules that can anneal to 5′ or 3′ regions of a gene (plus and minus strands, respectively, or vice-versa) and contain a short region in between. In general, amplification primers are from about 10 to 30 nucleotides in length and flank a region from about 50 to 200 nucleotides in length. Under appropriate conditions and with appropriate reagents, such primers permit the amplification of a nucleic acid molecule comprising the nucleotide sequence flanked by the primers. For in situ methods, mRNA does not need to be isolated from the cells prior to detection. In such methods, a cell or tissue sample is prepared/processed using known histological methods. The sample is then immobilized on a support, typically a glass slide, and then contacted with a probe that can hybridize to mRNA that encodes the marker.

[0293] As an alternative to making determinations based on the absolute expression level of the marker, determinations may be based on the normalized expression level of the marker. Expression levels are normalized by correcting the absolute expression level of a marker by comparing its expression to the expression of a gene that is not a marker, e.g., a housekeeping gene that is constitutively expressed. Suitable genes for normalization include housekeeping genes such as the actin gene, or epithelial cell-specific genes. This normalization allows the comparison of the expression level in one sample, e.g., a subject sample, to another sample, e.g., a non-cancerous sample, or between samples from different sources.

[0294] Alternatively, the expression level can be provided as a relative expression level. To determine a relative expression level of a marker, the level of expression of the marker is determined for 10 or more samples of normal versus cancer cell isolates, preferably 50 or more samples, prior to the determination of the expression level for the sample in question. The mean expression level of each of the genes assayed in the larger number of samples is determined and this is used as a baseline expression level for the marker. The expression level of the marker determined for the test sample (absolute level of expression) is then divided by the mean expression value obtained for that marker. This provides a relative expression level.

[0295] Preferably, the samples used in the baseline determination will be from cancer cells or normal cells of the same tissue type. The choice of the cell source is dependent on the use of the relative expression level. Using expression found in normal tissues as a mean expression score aids in validating whether the marker assayed is specific to the tissue from which the cell was derived (versus normal cells). In addition, as more data is accumulated, the mean expression value can be revised, providing improved relative expression values based on accumulated data. Expression data from normal cells provides a means for grading the severity of the cancer state.

[0296] In another preferred embodiment, expression of a marker is assessed by preparing genomic DNA or mRNA/cDNA (i.e. a transcribed polynucleotide) from cells in a subject sample, and by hybridizing the genomic DNA or mRNA/cDNA with a reference polynucleotide which is a complement of a polynucleotide comprising the marker, and fragments thereof. cDNA can, optionally, be amplified using any of a variety of polymerase chain reaction methods prior to hybridization with the reference polynucleotide. Expression of one or more markers can likewise be detected using quantitative PCR (QPCR) to assess the level of expression of the marker(s). Alternatively, any of the many known methods of detecting mutations or variants (e.g. single nucleotide polymorphisms, deletions, etc.) of a marker of the invention may be used to detect occurrence of a mutated marker in a subject.

[0297] In a related embodiment, a mixture of transcribed polynucleotides obtained from the sample is contacted with a substrate having fixed thereto a polynucleotide complementary to or homologous with at least a portion (e.g. at least 7, 10, 15, 20, 25, 30, 40, 50, 100, 500, or more nucleotide residues) of a marker of the invention. If polynucleotides complementary to or homologous with are differentially detectable on the substrate (e.g. detectable using different chromophores or fluorophores, or fixed to different selected positions), then the levels of expression of a plurality of markers can be assessed simultaneously using a single substrate (e.g. a “gene chip” microarray of polynucleotides fixed at selected positions). When a method of assessing marker expression is used which involves hybridization of one nucleic acid with another, it is preferred that the hybridization be performed under stringent hybridization conditions.

[0298] In another embodiment, a combination of methods to assess the expression of a marker is utilized.

[0299] Because the compositions, kits, and methods of the invention rely on detection of a difference in expression levels or copy number of one or more markers of the invention, it is preferable that the level of expression or copy number of the marker is significantly greater than the minimum detection limit of the method used to assess expression or copy number in at least one of normal cells and cancerous cells.

[0300] 3. Methods for Detection of Expressed Protein

[0301] The activity or level of a marker protein can also be detected and/or quantified by detecting or quantifying the expressed polypeptide. The polypeptide can be detected and quantified by any of a number of means well known to those of skill in the art. These may include analytic biochemical methods such as electrophoresis, capillary electrophoresis, high performance liquid chromatography (HPLC), thin layer chromatography (TLC), hyperdiffusion chromatography, and the like, or various immunological methods such as fluid or gel precipitin reactions, immunodiffusion (single or double), immunoelectrophoresis, radioimmunoassay (RIA), enzyme-linked immunosorbent assays (ELISAs), immunofluorescent assays, western blotting, and the like. A skilled artisan can readily adapt known protein/antibody detection methods for use in determining whether cells express a marker of the present invention.

[0302] A preferred agent for detecting a polypeptide of the invention is an antibody capable of binding to a polypeptide corresponding to a marker of the invention, preferably an antibody with a detectable label. Antibodies can be polyclonal, or more preferably, monoclonal. An intact antibody, or a fragment thereof (e.g., Fab or F(ab′)₂) can be used. The term “labeled”, with regard to the probe or antibody, is intended to encompass direct labeling of the probe or antibody by coupling (i.e., physically linking) a detectable substance to the probe or antibody, as well as indirect labeling of the probe or antibody by reactivity with another reagent that is directly labeled. Examples of indirect labeling include detection of a primary antibody using a fluorescently labeled secondary antibody and end-labeling of a DNA probe with biotin such that it can be detected with fluorescently labeled streptavidin.

[0303] In a preferred embodiment, the antibody is labeled, e.g. a radio-labeled, chromophore-labeled, fluorophore-labeled, or enzyme-labeled antibody). In another embodiment, an antibody derivative (e.g. an antibody conjugated with a substrate or with the protein or ligand of a protein-ligand pair {e.g. biotin-streptavidin}), or an antibody fragment (e.g. a single-chain antibody, an isolated antibody hypervariable domain, etc.) which binds specifically with a protein corresponding to the marker, such as the protein encoded by the open reading frame corresponding to the marker or such a protein which has undergone all or a portion of its normal post-translational modification, is used.

[0304] Proteins from cells can be isolated using techniques that are well known to those of skill in the art. The protein isolation methods employed can, for example, be such as those described in Harlow and Lane (Harlow and Lane, 1988, Antibodies: A Laboratory Manual, Cold Spring Harbor Laboratory Press, Cold Spring Harbor, N.Y.).

[0305] In one format, antibodies, or antibody fragments, can be used in methods such as Western blots or immunofluorescence techniques to detect the expressed proteins. In such uses, it is generally preferable to immobilize either the antibody or proteins on a solid support. Suitable solid phase supports or carriers include any support capable of binding an antigen or an antibody. Well-known supports or carriers include glass, polystyrene, polypropylene, polyethylene, dextran, nylon, amylases, natural and modified celluloses, polyacrylamides, gabbros, and magnetite.

[0306] One skilled in the art will know many other suitable carriers for binding antibody or antigen, and will be able to adapt such support for use with the present invention. For example, protein isolated from cells can be run on a polyacrylamide gel electrophoresis and immobilized onto a solid phase support such as nitrocellulose. The support can then be washed with suitable buffers followed by treatment with the detectably labeled antibody. The solid phase support can then be washed with the buffer a second time to remove unbound antibody. The amount of bound label on the solid support can then be detected by conventional means. Means of detecting proteins using electrophoretic techniques are well known to those of skill in the art (see generally, R. Scopes (1982) Protein Purification, Springer-Verlag, N.Y.; Deutscher, (1990) Methods in Enzymology Vol. 182: Guide to Protein Purification, Academic Press, Inc., N.Y.).

[0307] In another preferred embodiment, Western blot (immunoblot) analysis is used to detect and quantify the presence of a polypeptide in the sample. This technique generally comprises separating sample proteins by gel electrophoresis on the basis of molecular weight, transferring the separated proteins to a suitable solid support, (such as a nitrocellulose filter, a nylon filter, or derivatized nylon filter), and incubating the sample with the antibodies that specifically bind a polypeptide. The anti-polypeptide antibodies specifically bind to the polypeptide on the solid support. These antibodies may be directly labeled or alternatively may be subsequently detected using labeled antibodies (e.g., labeled sheep anti-mouse antibodies) that specifically bind to the anti-polypeptide.

[0308] In a more preferred embodiment, the polypeptide is detected using an immunoassay. As used herein, an immunoassay is an assay that utilizes an antibody to specifically bind to the analyte. The immunoassay is thus characterized by detection of specific binding of a polypeptide to an anti-antibody as opposed to the use of other physical or chemical properties to isolate, target, and quantify the analyte.

[0309] The polypeptide is detected and/or quantified using any of a number of well recognized immunological binding assays (see, e.g., U.S. Pat. Nos. 4,366,241; 4,376,110; 4,517,288; and 4,837,168). For a review of the general immunoassays, see also Asai (1993) Methods in Cell Biology Volume 37: Antibodies in Cell Biology, Academic Press, Inc. New York; Stites & Terr (1991) Basic and Clinical Immunology 7th Edition.

[0310] Immunological binding assays (or immunoassays) typically utilize a “capture agent” to specifically bind to and often immobilize the analyte (polypeptide or subsequence). The capture agent is a moiety that specifically binds to the analyte. In a preferred embodiment, the capture agent is an antibody that specifically binds a polypeptide. The antibody (anti-peptide) may be produced by any of a number of means well known to those of skill in the art.

[0311] Immunoassays also often utilize a labeling agent to specifically bind to and label the binding complex formed by the capture agent and the analyte. The labeling agent may itself be one of the moieties comprising the antibody/analyte complex. Thus, the labeling agent may be a labeled polypeptide or a labeled anti-antibody. Alternatively, the labeling agent may be a third moiety, such as another antibody, that specifically binds to the antibody/polypeptide complex.

[0312] In one preferred embodiment, the labeling agent is a second human antibody bearing a label. Alternatively, the second antibody may lack a label, but it may, in turn, be bound by a labeled third antibody specific to antibodies of the species from which the second antibody is derived. The second can be modified with a detectable moiety, e.g. as biotin, to which a third labeled molecule can specifically bind, such as enzyme-labeled streptavidin.

[0313] Other proteins capable of specifically binding immunoglobulin constant regions, such as protein A or protein G may also be used as the label agent. These proteins are normal constituents of the cell walls of streptococcal bacteria. They exhibit a strong non-immunogenic reactivity with immunoglobulin constant regions from a variety of species (see, generally Kronval, et al. (1973) J. Immunol., 111: 1401-1406, and Akerstrom (1985) J. Immunol., 135: 2589-2542).

[0314] As indicated above, immunoassays for the detection and/or quantification of a polypeptide can take a wide variety of formats well known to those of skill in the art.

[0315] Preferred immunoassays for detecting a polypeptide are either competitive or noncompetitive. Noncompetitive immunoassays are assays in which the amount of captured analyte is directly measured. In one preferred “sandwich” assay, for example, the capture agent (anti-peptide antibodies) can be bound directly to a solid substrate where they are immobilized. These immobilized antibodies then capture polypeptide present in the test sample. The polypeptide thus immobilized is then bound by a labeling agent, such as a second human antibody bearing a label.

[0316] In competitive assays, the amount of analyte (polypeptide) present in the sample is measured indirectly by measuring the amount of an added (exogenous) analyte (polypeptide) displaced (or competed away) from a capture agent (anti peptide antibody) by the analyte present in the sample. In one competitive assay, a known amount of, in this case, a polypeptide is added to the sample and the sample is then contacted with a capture agent. The amount of polypeptide bound to the antibody is inversely proportional to the concentration of polypeptide present in the sample.

[0317] In one particularly preferred embodiment, the antibody is immobilized on a solid substrate. The amount of polypeptide bound to the antibody may be determined either by measuring the amount of polypeptide present in a polypeptide/antibody complex, or alternatively by measuring the amount of remaining uncomplexed polypeptide. The amount of polypeptide may be detected by providing a labeled polypeptide.

[0318] The assays of this invention are scored (as positive or negative or quantity of polypeptide) according to standard methods well known to those of skill in the art. The particular method of scoring will depend on the assay format and choice of label. For example, a Western Blot assay can be scored by visualizing the colored product produced by the enzymatic label. A clearly visible colored band or spot at the correct molecular weight is scored as a positive result, while the absence of a clearly visible spot or band is scored as a negative. The intensity of the band or spot can provide a quantitative measure of polypeptide.

[0319] Antibodies for use in the various immunoassays described herein, can be produced as described below.

[0320] In another embodiment, level (activity) is assayed by measuring the enzymatic activity of the gene product. Methods of assaying the activity of an enzyme are well known to those of skill in the art.

[0321] In vivo techniques for detection of a biomarker protein include introducing into a subject a labeled antibody directed against the protein. For example, the antibody can be labeled with a radioactive marker whose presence and location in a subject can be detected by standard imaging techniques.

[0322] Certain markers identified by the methods of the invention may be secreted proteins. It is a simple matter for the skilled artisan to determine whether any particular marker protein is a secreted protein. In order to make this determination, the marker protein is expressed in, for example, a mammalian cell, preferably a human cell line, extracellular fluid is collected, and the presence or absence of the protein in the extracellular fluid is assessed (e.g. using a labeled antibody which binds specifically with the protein).

[0323] The following is an example of a method which can be used to detect secretion of a protein. About 8×10⁵ 293T cells are incubated at 37° C. in wells containing growth medium (Dulbecco's modified Eagle's medium {DMEM} supplemented with 10% fetal bovine serum) under a 5% (v/v) CO2, 95% air atmosphere to about 60-70% confluence. The cells are then transfected using a standard transfection mixture comprising 2 micrograms of DNA comprising an expression vector encoding the protein and 10 microliters of LipofectAMINE™ (GIBCO/BRL Catalog no. 18342-012) per well. The transfection mixture is maintained for about 5 hours, and then replaced with fresh growth medium and maintained in an air atmosphere. Each well is gently rinsed twice with DMEM which does not contain methionine or cysteine (DMEM-MC; ICN Catalog no. 16-424-54). About 1 milliliter of DMEM-MC and about 50 microcuries of Trans-³⁵S™ reagent (ICN Catalog no. 51006) are added to each well. The wells are maintained under the 5% CO₂ atmosphere described above and incubated at 37° C. for a selected period. Following incubation, 150 microliters of conditioned medium is removed and centrifuged to remove floating cells and debris. The presence of the protein in the supernatant is an indication that the protein is secreted.

[0324] It will be appreciated that subject samples, e.g., a sample containing tissue or cells, e.g., neuroglial tissue or cells, e.g., astrocytes, whole blood, serum, plasma, buccal scrape, saliva, spinal fluid, cerebrospinal fluid, urine, stool, may contain cells therein, particularly when the cells are cancerous, and, more particularly, when the cancer is metastasizing, and thus may be used in the methods of the present invention. The cell sample can, of course, be subjected to a variety of well-known post-collection preparative and storage techniques (e.g., nucleic acid and/or protein extraction, fixation, storage, freezing, ultrafiltration, concentration, evaporation, centrifugation, etc.) prior to assessing the level of expression of the marker in the sample. Thus, the compositions, kits, and methods of the invention can be used to detect expression of markers corresponding to proteins having at least one portion which is displayed on the surface of cells which express it. It is a simple matter for the skilled artisan to determine whether the protein corresponding to any particular marker comprises a cell-surface protein. For example, immunological methods may be used to detect such proteins on whole cells, or well known computer-based sequence analysis methods (e.g. the SIGNALP program; Nielsen et al., 1997, Protein Engineering 10:1-6) may be used to predict the presence of at least one extracellular domain (i.e. including both secreted proteins and proteins having at least one cell-surface domain). Expression of a marker corresponding to a protein having at least one portion which is displayed on the surface of a cell which expresses it may be detected without necessarily lysing the cell (e.g. using a labeled antibody which binds specifically with a cell-surface domain of the protein).

[0325] The invention also encompasses kits for detecting the presence of a polypeptide or nucleic acid corresponding to a marker of the invention in a biological sample, e.g., a sample containing tissue or cells, e.g., neuroglial tissue or cells, e.g., astrocytes, whole blood, serum, plasma, buccal scrape, saliva, spinal fluid, cerebrospinal fluid, urine, stool. Such kits can be used to determine if a subject is suffering from or is at increased risk of developing cancer. For example, the kit can comprise a labeled compound or agent capable of detecting a polypeptide or an mRNA encoding a polypeptide corresponding to a marker of the invention in a biological sample and means for determining the amount of the polypeptide or mRNA in the sample (e.g., an antibody which binds the polypeptide or an oligonucleotide probe which binds to DNA or mRNA encoding the polypeptide). Kits can also include instructions for interpreting the results obtained using the kit.

[0326] For antibody-based kits, the kit can comprise, for example: (1) a first antibody (e.g., attached to a solid support) which binds to a polypeptide corresponding to a marker of the invention; and, optionally, (2) a second, different antibody which binds to either the polypeptide or the first antibody and is conjugated to a detectable label.

[0327] For oligonucleotide-based kits, the kit can comprise, for example: (1) an oligonucleotide, e.g., a detectably labeled oligonucleotide, which hybridizes to a nucleic acid sequence encoding a polypeptide corresponding to a marker of the invention or (2) a pair of primers useful for amplifying a nucleic acid molecule corresponding to a marker of the invention. The kit can also comprise, e.g., a buffering agent, a preservative, or a protein stabilizing agent. The kit can further comprise components necessary for detecting the detectable label (e.g., an enzyme or a substrate). The kit can also contain a control sample or a series of control samples which can be assayed and compared to the test sample. Each component of the kit can be enclosed within an individual container and all of the various containers can be within a single package, along with instructions for interpreting the results of the assays performed using the kit.

[0328] 4. Method for Detecting Structural Alterations

[0329] The invention also provides a method for assessing whether a subject is afflicted with cancer or is at risk for developing cancer by comparing the structural alterations, e.g., mutations or allelic variants, of a marker in a cancer sample with the structural alterations, e.g., mutations of a marker in a normal, e.g., control sample. The presence of a structural alteration, e.g., mutation or allelic variant in the marker in the cancer sample is an indication that the subject is afflicted with cancer.

[0330] A preferred detection method is allele specific hybridization using probes overlapping the polymorphic site and having about 5, 10, 20, 25, or 30 nucleotides around the polymorphic region. In a preferred embodiment of the invention, several probes capable of hybridizing specifically to allelic variants are attached to a solid phase support, e.g., a “chip”. Oligonucleotides can be bound to a solid support by a variety of processes, including lithography. For example a chip can hold up to 250,000 oligonucleotides (GeneChip, Affymetrix™). Mutation detection analysis using these chips comprising oligonucleotides, also termed “DNA probe arrays” is described e.g., in Cronin et al. (1996) Human Mutation 7:244. In one embodiment, a chip comprises all the allelic variants of at least one polymorphic region of a gene. The solid phase support is then contacted with a test nucleic acid and hybridization to the specific probes is detected. Accordingly, the identity of numerous allelic variants of one or more genes can be identified in a simple hybridization experiment. For example, the identity of the allelic variant of the nucleotide polymorphism in the 5′ upstream regulatory element can be determined in a single hybridization experiment.

[0331] In other detection methods, it is necessary to first amplify at least a portion of a marker prior to identifying the allelic variant. Amplification can be performed, e.g., by PCR and/or LCR (see Wu and Wallace (1989) Genomics 4:560), according to methods known in the art. In one embodiment, genomic DNA of a cell is exposed to two PCR primers and amplification for a number of cycles sufficient to produce the required amount of amplified DNA. In preferred embodiments, the primers are located between 150 and 350 base pairs apart.

[0332] Alternative amplification methods include: self sustained sequence replication (Guatelli, J. C. et al., (1990) Proc. Natl. Acad. Sci. USA 87:1874-1878), transcriptional amplification system (Kwoh, D. Y. et al., (1989) Proc. Natl. Acad. Sci. USA 86:1173-1177), Q-Beta Replicase (Lizardi, P. M. et al., (1988) Bio/Technology 6:1197), and self-sustained sequence replication (Guatelli et al., (1989) Proc. Nat. Acad. Sci. 87:1874), and nucleic acid based sequence amplification (NABSA), or any other nucleic acid amplification method, followed by the detection of the amplified molecules using techniques well known to those of skill in the art. These detection schemes are especially useful for the detection of nucleic acid molecules if such molecules are present in very low numbers.

[0333] In one embodiment, any of a variety of sequencing reactions known in the alt can be used to directly sequence at least a portion of a marker and detect allelic variants, e.g., mutations, by comparing the sequence of the sample sequence with the corresponding reference (control) sequence. Exemplary sequencing reactions include those based on techniques developed by Maxam and Gilbert (Proc. Natl. Acad Sci USA (1977) 74:560) or Sanger (Sanger et al. (1977) Proc. Nat. Acad. Sci. 74:5463). It is also contemplated that any of a variety of automated sequencing procedures may be utilized when performing the subject assays (Biotechniques (1995) 19:448), including sequencing by mass spectrometry (see, for example, U.S. Pat. No. 5,547,835 and international patent application Publication Number WO 94/16101, entitled DNA Sequencing by Mass Spectrometry by H. Köster; U.S. Pat. No. 5,547,835 and international patent application Publication Number WO 94/21822 entitled “DNA Sequencing by Mass Spectrometry Via Exonuclease Degradation” by H. Köster), and U.S. Pat. No. 5,605,798 and International Patent Application No. PCT/US96/03651 entitled DNA Diagnostics Based on A Mass Spectrometry by H. Köster; Cohen et al. (1996) Adv Chromatogr 36:127-162; and Griffin et al. (1993) Appl Biochem Biotechnol 38:147-159). It will be evident to one skilled in the art that, for certain embodiments, the occurrence of only one, two or three of the nucleic acid bases need be determined in the sequencing reaction. For instance, A-track or the like, e.g., where only one nucleotide is detected, can be carried out.

[0334] Yet other sequencing methods are disclosed, e.g., in U.S. Pat. No. 5,580,732 entitled “Method of DNA sequencing employing a mixed DNA-polymer chain probe” and U.S. Pat. No. 5,571,676 entitled “Method for mismatch-directed in vitro DNA sequencing.”

[0335] In some cases, the presence of a specific allele of a marker in DNA from a subject can be shown by restriction enzyme analysis. For example, a specific nucleotide polymorphism can result in a nucleotide sequence comprising a restriction site which is absent from the nucleotide sequence of another allelic variant.

[0336] In a further embodiment, protection from cleavage agents (such as a nuclease, hydroxylamine or osmium tetroxide and with piperidine) can be used to detect mismatched bases in RNA/RNA DNA/DNA, or RNA/DNA heteroduplexes (Myers, et al. (1985) Science 230:1242). In general, the technique of “mismatch cleavage” starts by providing heteroduplexes formed by hybridizing a control nucleic acid, which is optionally labeled, e.g., RNA or DNA, comprising a nucleotide sequence of a marker allelic variant with a sample nucleic acid, e.g., RNA or DNA, obtained from a tissue sample. The double-stranded duplexes are treated with an agent which cleaves single-stranded regions of the duplex such as duplexes formed based on basepair mismatches between the control and sample strands. For instance, RNA/DNA duplexes can be treated with RNase and DNA/DNA hybrids treated with S1 nuclease to enzymatically digest the mismatched regions. In other embodiments, either DNA/DNA or RNA/DNA duplexes can be treated with hydroxylamine or osmium tetroxide and with piperidine in order to digest mismatched regions. After digestion of the mismatched regions, the resulting material is then separated by size on denaturing polyacrylamide gels to determine whether the control and sample nucleic acids have an identical nucleotide sequence or in which nucleotides they are different. See, for example, Cotton et al (1988) Proc. Natl. Acad Sci USA 85:4397; Saleeba et al (1992) Methods Enzymol. 217:286-295. In a preferred embodiment, the control or sample nucleic acid is labeled for detection.

[0337] In another embodiment, an allelic variant can be identified by denaturing high-performance liquid chromatography (DHPLC) (Oefner and Underhill, (1995) Am. J. Human Gen. 57:Suppl. A266). DHPLC uses reverse-phase ion-pairing chromatography to detect the heteroduplexes that are generated during amplification of PCR fragments from individuals who are heterozygous at a particular nucleotide locus within that fragment (Oefher and Underhill (1995) Am. J. Human Gen. 57:Suppl. A266). In general, PCR products are produced using PCR primers flanking the DNA of interest. DHPLC analysis is carried out and the resulting chromatograms are analyzed to identify base pair alterations or deletions based on specific chromatographic profiles (see O'Donovan et al. (1998) Genomics 52:44-49).

[0338] In other embodiments, alterations in electrophoretic mobility is used to identify the type of marker allelic variant. For example, single strand conformation polymorphism (SSCP) may be used to detect differences in electrophoretic mobility between mutant and wild type nucleic acids (Orita et al (1989) Proc Natl. Acad. Sci. USA 86:2766, see also Cotton (1993) Mutat Res 285:125-144; and Hayashi (1992) Genet Anal Tech Appl 9:73-79).

[0339] Single-stranded DNA fragments of sample and control nucleic acids are denatured and allowed to renature. The secondary structure of single-stranded nucleic acids varies according to sequence, the resulting alteration in electrophoretic mobility enables the detection of even a single base change. The DNA fragments may be labeled or detected with labeled probes. The sensitivity of the assay may be enhanced by using RNA (rather than DNA), in which the secondary structure is more sensitive to a change in sequence. In another preferred embodiment, the subject method utilizes heteroduplex analysis to separate double stranded heteroduplex molecules on the basis of changes in electrophoretic mobility (Keen et al. (1991) Trends Genet 7:5).

[0340] In yet another embodiment, the identity of an allelic variant of a polymorphic region is obtained by analyzing the movement of a nucleic acid comprising the polymorphic region in polyacrylamide gels containing a gradient of denaturant is assayed using denaturing gradient gel electrophoresis (DGGE) (Myers et al. (1985) Nature 313:495). When DGGE is used as the method of analysis, DNA will be modified to insure that it does not completely denature, for example by adding a GC clamp of approximately 40 bp of high-melting GC-rich DNA by PCR. In a further embodiment, a temperature gradient is used in place of a denaturing agent gradient to identify differences in the mobility of control and sample DNA (Rosenbaum and Reissner (1987) Biophys Chem 265:1275).

[0341] Examples of techniques for detecting differences of at least one nucleotide between two nucleic acids include, but are not limited to, selective oligonucleotide hybridization, selective amplification, or selective primer extension. For example, oligonucleotide probes may be prepared in which the known polymorphic nucleotide is placed centrally (allele-specific probes) and then hybridized to target DNA under conditions which permit hybridization only if a perfect match is found (Saiki et al, (1986) Nature 324:163); Saiki et al (1989) Proc. Natl Acad. Sci USA 86:6230; and Wallace et al. (1979) Nucl. Acids Res. 6:3543). Such allele specific oligonucleotide hybridization techniques may be used for the simultaneous detection of several nucleotide changes in different polymorphic regions of marker. For example, oligonucleotides having nucleotide sequences of specific allelic variants are attached to a hybridizing membrane and this membrane is then hybridized with labeled sample nucleic acid. Analysis of the hybridization signal will then reveal the identity of the nucleotides of the sample nucleic acid.

[0342] Alternatively, allele specific amplification technology which depends on selective PCR amplification may be used in conjunction with the instant invention. Oligonucleotides used as primers for specific amplification may carry the allelic variant of interest in the center of the molecule (so that amplification depends on differential hybridization) (Gibbs et al (1989) Nucleic Acids Res. 17:2437-2448) or at the extreme 3′ end of one primer where, under appropriate conditions, mismatch can prevent, or reduce polymerase extension (Prossner (1993) Tibtech 11:238; Newton et al. (1989) Nucl. Acids Res. 17:2503). This technique is also termed “PROBE” for Probe Oligo Base Extension. In addition it may be desirable to introduce a novel restriction site in the region of the mutation to create cleavage-based detection (Gasparini et al (1992) Mol. Cell Probes 6:1).

[0343] In another embodiment, identification of the allelic variant is carried out using an oligonucleotide ligation assay (OLA), as described, e.g., in U.S. Pat. No. 4,998,617 and in Landegren, U. et al., (1988) Science 241:1077-1080. The OLA protocol uses two oligonucleotides which are designed to be capable of hybridizing to abutting sequences of a single strand of a target. One of the oligonucleotides is linked to a separation marker, e.g., biotinylated, and the other is detectably labeled. If the precise complementary sequence is found in a target molecule, the oligonucleotides will hybridize such that their termini abut, and create a ligation substrate. Ligation then permits the labeled oligonucleotide to be recovered using avidin, or another biotin ligand. Nickerson, D. A. et al. have described a nucleic acid detection assay that combines attributes of PCR and OLA (Nickerson, D. A. et al., (1990) Proc. Natl. Acad. Sci. (U.S.A.) 87:8923-8927. In this method, PCR is used to achieve the exponential amplification of target DNA, which is then detected using OLA.

[0344] The invention further provides methods for detecting single nucleotide polymorphisms in a marker. Because single nucleotide polymorphisms constitute sites of variation flanked by regions of invariant sequence, their analysis requires no more than the determination of the identity of the single nucleotide present at the site of variation and it is unnecessary to determine a complete gene sequence for each subject. Several methods have been developed to facilitate the analysis of such single nucleotide polymorphisms.

[0345] In one embodiment, the single base polymorphism can be detected by using a specialized exonuclease-resistant nucleotide, as disclosed, e.g., in Mundy, C. R. (U.S. Pat. No. 4,656,127). According to the method, a primer complementary to the allelic sequence immediately 3′ to the polymorphic site is permitted to hybridize to a target molecule obtained from a particular animal or human. If the polymorphic site on the target molecule contains a nucleotide that is complementary to the particular exonuclease-resistant nucleotide derivative present, then that derivative will be incorporated onto the end of the hybridized primer. Such incorporation renders the primer resistant to exonuclease, and thereby permits its detection. Since the identity of the exonuclease-resistant derivative of the sample is known, a finding that the primer has become resistant to exonucleases reveals that the nucleotide present in the polymorphic site of the target molecule was complementary to that of the nucleotide derivative used in the reaction. This method has the advantage that it does not require the determination of large amounts of extraneous sequence data.

[0346] In another embodiment of the invention, a solution-based method is used for determining the identity of the nucleotide of a polymorphic site. Cohen, D. et al. (French Patent 2,650,840; PCT Appln. No. WO91/02087). As in the Mundy method of U.S. Pat. No. 4,656,127, a primer is employed that is complementary to allelic sequences immediately 3′ to a polymorphic site. The method determines the identity of the nucleotide of that site using labeled dideoxynucleotide derivatives, which, if complementary to the nucleotide of the polymorphic site will become incorporated onto the terminus of the primer.

[0347] An alternative method, known as Genetic Bit Analysis or GBA™ is described by Goelet, P. et al. (PCT Appln. No. 92/15712). The method of Goelet, P. et al. uses mixtures of labeled terminators and a primer that is complementary to the sequence 3′ to a polymorphic site. The labeled terminator that is incorporated is thus determined by, and complementary to, the nucleotide present in the polymorphic site of the target molecule being evaluated. In contrast to the method of Cohen et al. (French Patent 2,650,840; PCT Appln. No. WO91/02087) the method of Goelet, P. et al. is preferably a heterogeneous phase assay, in which the primer or the target molecule is immobilized to a solid phase.

[0348] Several primer-guided nucleotide incorporation procedures for assaying polymorphic sites in DNA have been described (Komher, J. S. et al., (1989) Nucl. Acids. Res. 17:7779-7784; Sokolov, B. P., (1990) Nucl. Acids Res. 18:3671; Syvanen, A.-C., et al., (1990) Genomics 8:684-692; Kuppuswamy, M. N. et al., (1991) Proc. Natl. Acad. Sci. (U.S.A.) 88:1143-1147; Prezant, T. R. et al., (1992) Hum. Mutat. 1:159-164; Ugozzoli, L. et al., (1992) GATA 9:107-112; Nyren, P. (1993) et al., Anal. Biochem. 208:171-175). These methods differ from GBA™ in that they all rely on the incorporation of labeled deoxynucleotides to discriminate between bases at a polymorphic site. In such a format, since the signal is proportional to the number of deoxynucleotides incorporated, polymorphisms that occur in runs of the same nucleotide can result in signals that are proportional to the length of the run (Syvanen, A. C., et al., (1993) Amer. J. Hum. Genet. 52:46-59).

[0349] For determining the identity of the allelic variant of a polymorphic region located in the coding region of a marker, yet other methods than those described above can be used. For example, identification of an allelic variant which encodes a mutated marker can be performed by using an antibody specifically recognizing the mutant protein in, e.g., immunohistochemistry or immunoprecipitation. Antibodies to wild-type marker or mutated forms of markers can be prepared according to methods known in the art.

[0350] Alternatively, one can also measure an activity of a marker, such as binding to a marker ligand. Binding assays are known in the art and involve, e.g., obtaining cells from a subject, and performing binding experiments with a labeled ligand, to determine whether binding to the mutated form of the protein differs from binding to the wild-type of the protein.

[0351] B. Pharmacogenomics

[0352] Agents or modulators which have a stimulatory or inhibitory effect on amount and/or activity of a marker of the invention can be administered to individuals to treat (prophylactically or therapeutically) a neurological disease, disorder, or condition in the subject. In conjunction with such treatment, the pharmacogenomics (i.e., the study of the relationship between an individual's genotype and that individual's response to a foreign compound or drug) of the individual may be considered. Differences in metabolism of therapeutics can lead to severe toxicity or therapeutic failure by altering the relation between dose and blood concentration of the pharmacologically active drug. Thus, the pharmacogenomics of the individual permits the selection of effective agents (e.g., drugs) for prophylactic or therapeutic treatments based on a consideration of the individual's genotype. Such pharmacogenomics can further be used to determine appropriate dosages and therapeutic regimens. Accordingly, the amount, structure, and/or activity of the invention in an individual can be determined to thereby select appropriate agent(s) for therapeutic or prophylactic treatment of the individual.

[0353] Pharmacogenomics deals with clinically significant variations in the response to drugs due to altered drug disposition and abnormal action in affected persons. See, e.g., Linder (1997) Clin. Chem. 43(2):254-266. In general, two types of pharmacogenetic conditions can be differentiated. Genetic conditions transmitted as a single factor altering the way drugs act on the body are referred to as “altered drug action.” Genetic conditions transmitted as single factors altering the way the body acts on drugs are referred to as “altered drug metabolism”. These pharmacogenetic conditions can occur either as rare defects or as polymorphisms. For example, glucose-6-phosphate dehydrogenase (G6PD) deficiency is a common inherited enzymopathy in which the main clinical complication is hemolysis after ingestion of oxidant drugs (anti-malarials, sulfonamides, analgesics, nitrofurans) and consumption of fava beans.

[0354] As an illustrative embodiment, the activity of drug metabolizing enzymes is a major determinant of both the intensity and duration of drug action. The discovery of genetic polymorphisms of drug metabolizing enzymes (e.g., N-acetyltransferase 2 (NAT 2) and cytochrome P450 enzymes CYP2D6 and CYP2C19) has provided an explanation as to why some subjects do not obtain the expected drug effects or show exaggerated drug response and serious toxicity after taking the standard and safe dose of a drug. These polymorphisms are expressed in two phenotypes in the population, the extensive metabolizer (EM) and poor metabolizer (PM). The prevalence of PM is different among different populations. For example, the gene coding for CYP2D6 is highly polymorphic and several mutations have been identified in PM, which all lead to the absence of functional CYP2D6. Poor metabolizers of CYP2D6 and CYP2C19 quite frequently experience exaggerated drug response and side effects when they receive standard doses. If a metabolite is the active therapeutic moiety, a PM will show no therapeutic response, as demonstrated for the analgesic effect of codeine mediated by its CYP2D6-formed metabolite morphine. The other extreme are the so called ultra-rapid metabolizers who do not respond to standard doses. Recently, the molecular basis of ultra-rapid metabolism has been identified to be due to CYP2D6 gene amplification.

[0355] Thus, the amount, structure, and/or activity of a marker of the invention in an individual can be determined to thereby select appropriate agent(s) for therapeutic or prophylactic treatment of the individual. In addition, pharmacogenetic studies can be used to apply genotyping of polymorphic alleles encoding drug-metabolizing enzymes to the identification of an individual's drug responsiveness phenotype. This knowledge, when applied to dosing or drug selection, can avoid adverse reactions or therapeutic failure and thus enhance therapeutic or prophylactic efficiency when treating a subject with a modulator of amount, structure, and/or activity of a marker of the invention.

[0356] C. Monitoring Clinical Trials

[0357] Monitoring the influence of agents (e.g., drug compounds) on amount, structure, and/or activity of a marker of the invention can be applied not only in basic drug screening, but also in clinical trials. For example, the effectiveness of an agent to affect marker amount, structure, and/or activity can be monitored in clinical trials of subjects receiving treatment for a neurological disease, disorder, or condition. In a preferred embodiment, the present invention provides a method for monitoring the effectiveness of treatment of a subject with an agent (e.g., an agonist, antagonist, peptidomimetic, protein, peptide, antibody, nucleic acid, antisense nucleic acid, ribozyme, small molecule, RNA interfering agent, or other drug candidate) comprising the steps of (i) obtaining a pre-administration sample from a subject prior to administration of the agent; (ii) detecting the amount, structure, and/or activity of one or more selected markers of the invention in the pre-administration sample; (iii) obtaining one or more post-administration samples from the subject; (iv) detecting the amount, structure, and/or activity of the marker(s) in the post-administration samples; (v) comparing the level of expression of the marker(s) in the pre-administration sample with the amount, structure, and/or activity of the marker(s) in the post-administration sample or samples; and (vi) altering the administration of the agent to the subject accordingly. For example, increased administration of the agent can be desirable to increase amount and/or activity of the marker(s) to higher levels than detected, i.e., to increase the effectiveness of the agent. Alternatively, decreased administration of the agent can be desirable to decrease amount and/or activity of the marker(s) to lower levels than detected, i.e., to decrease the effectiveness of the agent.

[0358] This invention is further illustrated by the following examples which should not be construed as limiting. The contents of all references, figures, tables, Appendices, Accession Numbers, patents and published patent applications cited throughout this application are hereby incorporated by reference.

### EXEMPLIFICATION

### Example 1

### Identification of Novel Astrocyte-Specific Markers

[0359] Astrocytes have long been postulated to play a role in normal brain function by regulating neurotransmitters (glutamate), ions (K+) and metabolic substrates (glucose), as well as respond to brain injuries caused by trauma, stroke and seizures. More recently its becoming increasingly clear that astrocytes may also play an important role(s) in neurodegenerative diseases (Alzheimers). Astrocytes or their precursor also is the likely cell of origin for the most frequent and the deadliest form of primary brain tumor, Glioblastoma multiforme. While the distinction between neuronal stem cells and astrocytes is unclear, evidence suggests that a distinct subtype of astrocytes in the subventricular zone (SVZ) and in the subgranular zone of the hippocampus, may retain the ability to differentiate into neurons, oligodendrocytes and astrocytes, and can functionally be defined as a stem cell. The potential importance of this question to both basic and clinical research is clear and the goal of identifying markers which are unique to astrocytes of the outmost importance.

### A. Materials and Methods

[0360] NSC and astrocyte culture techniques. Primary neural stem cells (NSCs) were isolated from murine E13.5 embryos as described (Reynolds, B. A. & Weiss, S. (1992) Science 255, 1707-1710). Neurospheres were differentiated into astrocyte predominant cultures by exposure to: 10% fetal bovine serum, CNTF (50 ng/ml), BMP2 (50 ng/ml) or PACAP (50 ng/ml). Neuronal cultures were derived from E13.5 hippocampal primordia by previously described methods. Primary cortical astrocytes were isolated from 1-2 day old neonates and prepared according to published methods (McCarthy, K. D. & de Vellis, J. (1980) J Cell Biol 85, 890-902).

[0361] The transcriptional profile strategy for the identification of astrocyte-relevant transcripts exploited various primary and induced astrocyte culture systems, primary neuron cultures, NSCs, and regionally defined and developmentally staged CNS tissues including E13.5 cortex, the corpus callosum isolated from postnatal (P5 and P10) brain, and neocortical layers II-VI and subpial/glial limitans of the 6 week old adult brain. Total RNA was used to prepare in vitro transcribed amplified probes and the hybridized to oligonucleotide microarrays (Affymetrix U74Av2) representing 12488 probe sets representing 8,585 mouse genes.

[0362] Data processing and normalization. The CEL files were obtained using Affymetrix Microarray Suite software. The DNA-Chip Analyzer (dChip.org, version 1.3) was used to normalize all CEL files to the baseline arrays and compute the model-based expression (PM-only model) (Li, C. a. W., W. H. (2003) in The analysis of gene expression data: methods and software, ed. Parmigiani, G., Irizarry, E. S. G. R., Zeger, S. L. (Springer)). Arrays were normalized within tissue types by picking the baseline arrays for each tissue type. When calculating the model-based expression, constant array outliers within each of the six groups—10% FCS, CNTF/BMP2/PACAP, hippocampal neurons, primary cortical astrocytes, the gray matter and the corpus callosum/glial limitans were considered as a real biological effect.

[0363] Gene annotation. Each probe set was mapped to a LocusLink ID using the annotation provided by Affymetrix. LocusLink IDs and their annotations were updated by the most recent NCBI LocusLink database annotations.

[0364] Pooling the replicates and lower bound fold change. Replicate samples were averaged by considering model-based standard errors of individual expression values using a resampling method (Li, C. a. W., W. H. (2003) in The analysis of gene expression data: methods and software, ed. Parmigiani, G., Irizarry, E. S. G. R., Zeger, S. L. (Springer)). To identify the genes with large change between two groups of replicates, the parametric estimation of lower bound fold change (LBFC) was used as the measure of change (Li, C. & Wong, W. H. (2001) Proc Natl Acad Sci USA 98, 31-6). The selection criteria of selecting genes with LBFC of equal to or greater than 3 typically corresponds to a fold change of at least 5 in conventional gene expression assays such as quantitative PCR.

[0365] Selection of genes that contribute most in distinguishing the astrocyte culture samples and NSC/early embryo brain samples. 2,061 genes with large variation and high presence call (by dChip) were chosen and R-SVM was used to identify the genes contributing most in distinguishing two sample groups (Zhang, X. a. W., W. H. (2001) Technical Report, Department of Biostatistics, Harvard University). Unlike other gene-wise analysis, this algorithm finds a set of genes that work as a group in separating two sample groups by recursively building linear Support Vector Machines (SVM) (Collobert, R., and Bengio, S. (2001) Journal of Machine Learning Research 1, 143-160). To overcome possible overfitting, the leave-one-out cross-validation was performed and the error rate was zero. Both the gene selection step and the SVM building step were included in cross-validation.

[0366] Selection of up-regulated genes in each sample type. A gene was determined to be up regulated in a sample type if (1) the gene is called present (by dChip) 50% or higher in at least one of two groups being compared, and (2) its LBFC is greater than the 3.

[0367] Sample clustering and gene clustering. For each clustering, genes with sufficient variation and high presence call (by dChip) percentage were selected. dChip performed the hierarchical clustering using agglomerative method (bottom up) with 1 minus correlation as the distance between genes and centroid-linkage as the inter-cluster distance. A sequential clustering algorithm (developed by Tseng and Wong, 2003, Harvard Biostatistics Technical report and software) was also used to look for the genes that ‘tightly’ co-regulate with in-situ validated astrocyte specific genes. In contrast to conventional hierarchical clustering, which clusters all genes, this algorithm finds the tightest clusters sequentially and exclude genes with uncertain memberships to the clusters.

[0368] Finding significant functional categories in a gene list with size n. The annotation information in the dChip MG_U74Av2 gene information file was also used to classify genes in a list into different functional categories of gene ontology and to compute their significance values (p<0.02).

[0369] Validation of Astrocyte Candidate Genes by In-Situ hybridization. Probes were scored for labeling efficacy, CNS expression, and brain region/cell type distribution. Genes with a “glial” expression pattern across neural development (i.e. increasing expression from E13.5 to adult, expression in white matter, glial limitans, SVZ) were in most cases easily separated from those with a neuronal only type pattern (i.e. hippocampus, specific cortical layers) by anatomical assessment alone. Genes suspected to be ‘astrocytic/glial’ by anatomic criteria were stringently validated for cell type specificity by combining ISH with several lineage specific immunohistochemical markers, including GFAP (astrocytic), Olig2/(oligodendroglial), or NeuN (neuronal).

### B. Results

[0370] Reproducibility and Distinctiveness of Transcriptional Profiles. To identify astrocyte-specific genes, a multilevel biological prioritization and filtering scheme was implemented based upon the combined use of several in vitro astrocyte differentiation systems, isolated primary astrocytes from the perinatal brain, and various microdissected astrocyte-rich regions of the telencephalon (FIG. 1). The first series of experiments exploited the capacity of various agents (10% FCS, CNTF, BMP2, or PACAP) to elicit a common astrocytic phenotype from NSCs, reasoning that comparative transcriptional profiles across these protocols should enrich for genes common to most astrocytes regardless of isolation and induction procedures. Replicates within a given experimental modality or tissue type demonstrated a high degree of reproducibility (correlation coefficient 0.95-0.99) and when analyzed as groups, highlighted the distinctiveness of the astrocyte profile from the profiles of neurons, NSCs and embryonic cortex (FIG. 5). The reproducibility and fidelity of these microarray datasets serve to document the quality and purity of the samples used, thereby supporting their use in molecularly defining the astrocyte lineage.

[0371] Identification of Novel Astrocyte Markers. To determine that all astrocytes share a common transcriptional profile, unsupervised hierarchical clustering (UHC) of all experimental samples was performed (FIG. 2A). This unbiased approach organized the experimental samples into two major groups, one consisting of multipotent NSC and lineage committed progenitors (NSCs, E13.5 neocortex, and hippocampal neuroblasts) and the other containing differentiated astrocytes. The remarkably similar expression profiles among the various in vitro differentiated astrocytes and their tight association with the primary cortical astrocytes indicates that, despite the distinct signaling pathways engaged by the various agents used to drive commitment to the astrocyte lineage, they share a similar molecular profile. Similarly, the tight clustering of microdissected brain subregions, corpus callosum, gray matter and glial limitans, demonstrates a high degree of transcriptional relatedness that is related in part to their astrocyte-rich composition. The lack of significant overlap among the in vitro and in vivo UHC clusters likely results from a combination of the cell type heterogeneity of the CNS tissues as well as culture-induced stimulation of astrocytes to assume a ‘reactive’ rather than the resting state typical of astrocytes in the normal brain. Together, these findings support the use of the multiple sample types as an experimental approach for the identification of candidate astrocyte genes that are expressed in normal brain.

[0372] An in-depth bioinformatic search for astrocyte-specific genes comprised three different methods: (i) a biased search for genes with an expression pattern similar to the best known astrocyte marker, GFAP, (ii) an unbiased search by a novel class prediction tool, Recursive-Supervised Machine (R-SVM) analysis, and (iii) an empirical threshold approach to identify a common set of genes among complementary data sets. In the GFAP cluster analysis, GFAP captured a group of 393 genes that were differentially expressed by all in vitro astrocyte samples (FIG. 2A). While this cluster likely represents a potential source of novel astrocyte genes (see Table 2 for complete list)), it is notable that no clear GFAP subcluster emerged and, correspondingly, a random sampling of genes among the GFAP cluster revealed their limited expression in CNS astrocytes by RNA ISH (see below). All astrocyte candidate genes identified by R-SVM, ‘common in-vitro’ and ‘common in-vivo’. Next, to avoid the bias of so-called signature genes, R-SVM analysis was employed to identify genes that ‘as a group’ (unlike genes found by other traditional two-group comparison methods) contribute most to distinguishing the two groups (Zhang, X. a. W., W. H. (2001) Technical Report, Department of Biostatistics, Harvard University). From a total of 2,005 genes, which show sufficient variation in expression over all samples, R-SVM identified a set of 85 genes that most significantly contribute to the astrocyte group (FIG. 2B). The relative contribution of each gene in distinguishing astrocytes from the NSC and early-lineage committed cells is presented in Table 3. Table 3 shows that the union of these 3 experimental datasets produced a list of 153 genes. For R-SVM, the relative contribution of each gene to distinguishing the astrocyte group is presented as percent contribution of the total gene pool contribution. Also presented for direct comparison is the maximum LBFC of genes from the common in-vitro and common in-vivo datasets. There is considerable concordance among the datasets; genes which contribute most to distinguishing the astrocyte group R-SVM, also have a high LBF change value. Furthermore it shows that once the R-SVM list is exhausted (R-SVM contribution=0) there are still a large number of astrocyte candidate genes, which are identified either by the common in-vitro or common in-vivo lists, or both. These data support the usefulness of these complimentary datasets. Importantly, the gene that contributes most significantly is the main lipid transport protein in the CNS, apolipoprotein E (apoE) (8.8%), whereas the GFAP is ranked number 22 (0.43%).

[0373] To capture a greater representation of the astrocyte transcriptome in a physiological context, empirical threshold studies were also conducted to compare the datasets of corpus callosum, gray matter and glial limitans with those derived from E13.5 cortex (a period of development preceding the birth of astrocytes, circa E17.5). The application of the expression criteria of >3 LBFC relative to E13.5 cortex yielded 84 genes in the corpus callosum, 103 in the gray matter and 100 in glial limitans. An intersection of these three gene lists generated a list of 47 ‘common in vivo’ genes, which could represent candidate astrocyte genes since this cell type is common to these brain subregions. Of these 47 ‘common in-vivo’ genes, 8 genes were differentially expressed (>3 LBFC) among the ‘common in vitro’ genes which are defined as genes expressed in at least 4 of 5 in vitro astrocyte datasets (a complete list of the union of these genes is presented in Table 3. These data support the assumption that there may be qualitative and quantitative differences between the genes expressed by astrocytes maintained in cell culture and those found in the normal brain. It is also possible that this limited overlap reflects regionally restricted expression patterns of astrocytes in various brain microenvironments (i.e., only in corpus callosum, gray matter, or glial limitans). To obtain a more complete view of potential molecular diversity of astrocytes in the adult brain, a pair-wise comparison of each CC, GM and GL gene list was performed and union of the four in vitro astrocyte datasets. These comparisons yielded 33, 29 and 23 genes for the CC, GM and GL, respectively (see Tables 4A, 4B, and 4C. Table 4A shows that 33/41 genes/probesets were up-regulated in corpus callosum and at least one culture system. Table 4B shows that 29/37 genes/probesets were up-regulated in gray matter and at least one culture system. Table 4C shows that 23/30 genes/probe-sets were up-regulated in glial limitans and at least one culture system.

[0374] These data underscore that markedly distinct molecular profiles can emerge through the use of specific tissues, model systems and experimental conditions and the application of specific bioinformatic methods, further justifying the comprehensive set of comparisons, bioinformatic approaches, model systems and distinct astrocyte and non-astrocytic tissues and cell types.

[0375] Validation of candidate astrocyte-specific genes. A combination of ISH and lineage-specific immunohistochemical (IHC) markers were utilized to assess the temporal and spatial patterns of a cross-section of the candidate astrocyte-associated genes derived from various datasets.

[0376] Of the 83 genes that were differentially expressed (>3 LBFC) by exposure to 10% FCS, the top 19 genes were tested by ISH, of these, 2 (GFAP and aquaporin 4) identified astrocytes in adult mouse brain (Table 1). The ability to identify astrocytes by ISH improved moderately when genes were selected from among the large UHC of astrocyte associated genes (so-called, GFAP co-cluster) (19 of 37). The R-SVM approach proved to be most effective with 10 of 13 candidate genes identifying astrocytes, while the ‘common in vivo ’ and ‘common in vitro’ lists identified and 9 of 12 genes and 8 of 13 genes, respectively.

[0377] Table 1 summarizes the validation of astrocyte candidate genes by combination of ISH and IHC. The Table shows that a random selection of differentially expressed (>3LBFC) genes from in vitro differentiated NSC's produces poor prediction of astrocyte specific genes. This performance improves among a common set of genes differentially expressed following NSC differentiation by serum, CNTF, BMP2, PACAP (UHC GFAP co-cluster). Even greater success was achieved with R-SVM, ‘common in vitro’ and ‘common in vivo’ data sets in validating astrocyte candidate genes by combined ISH and IHC.

[0378] Notably, the validated astrocyte genes exhibit widely varying patterns of expression with only a small subset showing co-expression with GFAP, yet staining cells with unequivocal astrocyte morphology. Of the genes with a restricted expression pattern, 3 genes had a GFAP-like pattern with cells predominantly labeled in the white matter, GL, and SVZ (aquaporin 4, brain glycogen phosphorylase, and brevican). Aquaporin 4 was predominantly expressed by astrocytes of the GL in the subpial and perivascular locations, as reported previously (Nielsen, S., et al. (1997) J Neurosci 17, 171-80), while 5 genes were prominently expressed in the SVZ and to a more limited extent in the adjacent gray matter (Id3, vascular cell adhesion molecule 1, N-myc downregulated 2, integral membrane protein 1, and endothelial differentiation receptor 1). In addition, 2 genes labeled ependymal cells (diazepam binding inhibitor and interleukin 6 signal transducer), these genes were included here since ependymal cells label positively with GFAP and may arise from a common precursor. Many genes had a heterogeneous expression pattern, labeling scattered populations of cells in the gray matter, while 5 genes had a broad pattern of expression labeling cells in the subventricular zone, white matter and throughout the gray matter of the telencephalon; these included clusterin, cystatin C, apoE, glutathione S-transferase and aldolase 3 (see FIG. 3; all validated genes are listed in Table 5 and Table 7).

[0379] Tight Cluster Analysis of Candidate Astrocyte-Specific Genes. The collection of validated astrocyte genes makes possible an effective prospective bioinformatic identification of additional astrocyte genes and a more comprehensive molecular view of this lineage. To that end, a novel clustering algorithm capable of identifying genes that ‘tightly cluster’ with validated genes was used. 2,061 genes with sufficient variability over samples were selected for tight cluster analysis using both in vitro and in vivo samples, 51% of the probe sets were assigned to the top 30 tightest clusters of which 4 were identified by inclusion of 6 validated astrocyte genes (see FIG. 4A). These tight clusters are remarkable for identifying differentially expressed genes in both the cultured astrocytes and normal brain, but not in NSCs, neurons or embryonic brain. For the in vitro sample datasets, there were 9 tight clusters all of which contained one or more of our validated astrocyte-associated genes. Data presented in FIG. 4B shows 3 representatives of 9 tight clusters from the cultured astrocyte dataset, each identified by several ISH validated genes (total 16 in situ validated genes among the 9 tight clusters). Each tight cluster was dominated by a single, statistically significant (p<0.01), functional gene ontology category (see below and Table 6). Table 6 shows the functional categories of ISH validated astrocyte genes and the genes identified by tight cluster analysis, (the clusters and gene names are shown in FIG. 4; ‘T’, ‘M’, and ‘B’, represent top, middle and bottom tight clusters, respectively). Each tight cluster is represented by only one or two statistically significant functional categories. These data indicate that co-expression may predict a common function. Furthermore, these results suggest that tight cluster analysis is not only an efficient means of identifying cell type specific genes, it can also identify functionally related astrocyte genes, which reflect on normal astrocyte functions.

[0380] Among the 46 GFAP co-clustered genes identified by tight cluster algorithm (FIG. 4B), which exclude genes with uncertain membership, 5 of 7 genes tested by ISH proved to be astrocyte-specific (phospholipase A2 group 7, gap-junction channel protein 1-alpha, aquaporin 4, vascular cell adhesion molecule 1 and brain glycogen phosphorylase). These results underscore that the tight cluster tool represents an efficient means of identifying additional astrocyte markers. Furthermore, the performance of the tight cluster results continues to improve as more candidate genes are validated by ISH and that information is used to refine the tight clustering parameters.

[0381] Functional Annotation of Validated Astrocyte Genes and Tight Cluster Genes. Functional classification by the Gene Ontology (GO) database yielded many significant and distinct categories (see Table 6). Among them are categories consistent with known astrocyte function including genes encoding potent antioxidant activity (e.g., glutathione S-transferase, peroxiredoxin 5), excitatory amino acid uptake (solute carrier 1), immune modulation/chemotaxis (e.g., CXCR4, CX3-C motif 1), microvascular regulation (PLA2g7, thrombospondin, vascular cell adhesion molecule) and blood brain barrier function (aquaporin 4). Of special note is a prominently represented category linked to lipid transport and metabolism (e.g., apoE, fatty acid binding protein, steroyl CoA desaturase-2), providing evidence for the concept that astrocytes play an obligatory role in cholesterol synthesis and transport to neurons.

### Example 2

### Generation of a Mouse Model of Neuroblastoma

[0382] The generation of mouse models that faithfully recapitulate human Glioblastoma (GBM) enables genetic and biological dissection of disease initiation and progression and facilitates the systematic evaluation of targeted therapy. A central issue in the accurate generation of such models relates to the possible cellular origins of GBM along the neural stem cell to astrocyte axis. Current mouse models support the view that GBM may originate from the malignant transformation of NSC stem cells, early glial progenitors, and/or mature astrocytes that carry specific combinations of genetic mutations. The development of accurate animal models of GBM is critical in establishing mechanisms underlying tumorigenesis and providing a means for pre-clinical testing of novel therapeutic agents.

[0383] The use of transgenic mice for this purpose requires availability of promoter/enhancer elements (or Control Regulatory Modules (CRMs)) that can drive expression of genes in specific cellular compartments. Indeed, a major barrier in brain tumor research is the lack of CRMs that can target subsets of the astrocyte lineage in vivo. For example, the currently available GFAP, nestin and S100b promoters all drive expression in early progenitor cells, which has limited efforts to establish a mechanism of glioma formation by astrocyte de-differentiation in vivo. Thus, in the absence of truly robust astrocyte-specific CRMs, the central question of ‘glioma cell of origin’ in vivo remains ambiguous.

[0384] The identification of the astrocyte-specific markers described herein and listed in Tables 2 and 5 has led to the identification of several gene expression domains that may be used to develop new CRMs.

[0385] In order to validate the capacity of various CRMs for driving expression of useful reporter genes or Cre recombinase specifically in the mature astrocyte compartment or discrete subsets of such cells, the global expression patterns, of these markers was assessed by quantitative RT-PCR using RNA from the brain and major organs of E13.5, P0, P5 and adult mice. Quantitative PCR was performed using specific primers for the candidate CRMs, compared to a reference control gene (ribosomal RNA gene). As demonstrated in FIGS. 6A-6F, five gene candidates showed high expression in the brain relative to the other organs with increasing expression from P0 to adult.

[0386] In order to use these astrocyte-specific CRMs to develop animal models of neurological disease, a targeting plasmid is constructed using genomic DNA fragments derived from Sv129 mouse strain. A neuroglial promoter element (astrocyte-specific CRM) is operably linked to, for example, a Cre recombinase and a neomycin/thymidine kinase cassette is introduced into the EGFR locus. Embryonic stem (ES) cell (derived from Sv129 strain) electroporation, selection and screening are performed using standard gene targeting techniques. Genomic DNA is isolated from neomycin-resistant ES cell clones, digested with BamHI and subjected to hybridization using a probe to detect homologous recombination and the presence of the Cre allele. Chimeric founders are bred with wild-type C57BL/6 mice to obtain offspring containing a germ-line EGFR-Cre allele. These mice are subsequently bred with transgenic mice carrying loxP cites to excise Cre and put EGFR under the control of the neuroglial specific promoter.

### EQUIVALENTS

[0387] Those skilled in the art will recognize, or be able to ascertain using no more than routine experimentation, many equivalents to the specific embodiments of the invention described herein. Such equivalents are intended to be encompassed by the following claims.

1. A method of assessing whether a subject is afflicted with a neurological disease, disorder or condition, the method comprising comparing:
a) the amount and/or activity of at least one marker in a subject sample, wherein the at least one marker is selected from the group consisting of the markers listed in Table 2, and
b) the normal amount and/or activity of at the least one marker in a control sample from a subject not afflicted with a neurological disease, disorder or condition,
wherein modulation of the amount and/or activity of the at least one marker in the subject sample compared to the normal amount and/or activity is an indication that the subject is afflicted with a neurological disease, disorder or condition.

2. The method of claim 1, wherein the amount or activity of at least one marker is compared.

3. (canceled)

4. The method of claim 2, wherein the amount of at least one marker is determined by determining the level of expression or by determining the copy number of the marker.

5. (canceled)

6. The method of claim 4, wherein the level of expression of the at least one marker is assessed by detecting the presence in the sample of a protein corresponding to the marker.

7. The method of claim 6, wherein the presence of the protein is detected using a reagent which specifically binds the protein selected from the group consisting of an antibody, an antibody derivative, and an antibody fragment.

8. (canceled)

9. The method of claim 4, wherein the level of expression of the at least one marker in the sample is assessed by detecting the presence of a transcribed polynucleotide or portion thereof, wherein the transcribed polynucleotide comprises the marker.

10. The method of claim 9, wherein the transcribed polynucleotide is an mRNA or a cDNA.

11. (canceled)

12. The method of claim 9, wherein the step of detecting further comprises amplifying the transcribed polynucleotide.

13. The method of claim 4, wherein the level of expression of the at least one marker in the sample is assessed by detecting the presence in the sample of a transcribed polynucleotide which anneals with the marker or anneals with a portion of a polynucleotide wherein the polynucleotide comprises the at least one marker, under stringent hybridization conditions.

14. The method of claim 1, wherein the subject sample is selected from the group consisting of neuroglial tissue, whole blood, serum, plasma, buccal scrape, saliva, cerebrospinal fluid, spinal fluid, urine and stool.

15. The method of claim 1, wherein the at least one marker is selected from the subset of markers in listed in Table 5 or Table 7.

16-21. (canceled)

22. A method of selecting a composition capable of modulating a symptom of neurological disease, disorder or condition, the method comprising:
a) providing a sample comprising astrocytes;
b) contacting said sample with a test compound; and
c) determining the ability of the test compound to modulate the amount and/or activity of at least one marker, wherein the marker is selected from the group consisting of the markers listed in Table 2; and
thereby identifying a composition capable of modulating a symptom of a neurological disease, disorder or condition.

23. The method of claim 22, wherein the astrocytes are isolated from an animal model of a neurological disease, disorder or condition.

24. The method of claim 22, wherein the astrocytes are isolated from a neural cell line.

25. The method of claim 22, wherein the astrocytes are isolated from a subject suffering from a neurological disease, disorder or condition.

26. The method of claim 22, further comprising administering the test compound to an animal model of a neurological disease, disorder or condition.

27. The method of claim 22, wherein the at least one marker is selected from the subset of markers listed in Table 5 or Table 7.

28. A method of treating a subject afflicted with a neurological disease, disorder or condition comprising administering to the subject a therapeutically effective amount of a compound which modulates the amount and/or activity of a gene or protein corresponding to at least one marker listed in Table 2, thereby treating a subject afflicted with a neurological disease, disorder or condition.

29. The method of claim 28, wherein the at least one marker is selected from the subset of markers listed in Table 5 or Table 7.

30-44. (canceled)

45. A kit for assessing whether a subject is afflicted with a neurological disease, disorder or condition, the kit comprising reagents for assessing the amount and/or activity of at least one marker selected from the group consisting of the markers listed in Table 2.

46. The kit of claim 45, wherein the at least one marker is selected from the subset of markers listed in Table 5 or Table 7.

47-53. (canceled)

54. A recombinant vector comprising an astrocyte-specific promoter operably linked to a Cre recombinase.

55. The recombinant vector of claim 54, wherein said vector further comprises an inducible fusion protein.

56-57. (canceled)

58. A cell or cell line comprising the recombinant vector of claim 54.

59. A non-human animal containing the recombinant vector of claim 54.

60-72. (canceled)

The application's sequence listing, which the Patent Office published only in electronic form, follows.

SEQUENCE LISTING (767 sequences)

SEQ ID NO: 1 - DNA, 3129 bp, Mus musculus
cgccgggcggcttggggggccgccgcccgccggactccgcgtccgccccgccaccggtgccagccatggagccccgagccccccgccgccgacacacccaccagcgcggctacctgctgacgcgggacccgcatctcaacaaggacttggcttttactctggaagagagacagcagttgaacattcatggattgttgccgccctgcatcatcagccaggagctccaggtccttagaataattaagaatttcgaacgactgaactctgacttcgacaggtatctcctgttaatggacctgcaagacagaaatgagaagctcttctacagcgtgctcatgtctgatgttgaaaagttcatgcctattgtttacacccccaccgtgggcctcgcatgccagcagtacagtttggcattccggaagccaagaggcctctttattagtatccatgacaaagggcacattgcttcagttcttaatgcatggccagaggatgtcgtcaaggctattgtggtaactgatggagagcgcatccttggcttgggagaccttggctgtaatgggatgggcatccctgtgggtaaactggccctttacacggcatgtggaggggtgaacccacaacagtgtctacccatcactttggatgtgggaacagaaaatgaggagttacttaaggatccactgtacatcgggctgcggcaccggcgagtcagaggccctgagtatgacgccttcctggatgagttcatggaggcagcgtcttccaaatatggcatgaattgccttattcagtttgaagattttgccaatcggaatgcatttcgtctcctgaacaagtatcgaaacaagtattgcacatttaacgatgatattcaaggaacagcgtctgttgcggttgcgggtctccttgcagctcttcgaataaccaagaacaagctctctgatcagacagtgctgttccagggagctggagaggctgccttggggattgctcacttggttgttatggccatggagaaagaaggtttatcaaaggagaatgctagaaagaagatatggttggttgactcaaaaggactaatagttaagggtcgtgcatctctcacagaagagaaagaggtgtttgcccatgaacatgaagaaatgaagaatctggaagccattgttcaaaagataaaaccaactgccctcataggagttgctgcaattggtggtgctttcactgaacaaattctcaaggatatggctgccttcaacgagcggcccatcatctttgctttgagtagtccgaccagcaaagcggagtgctctgcagacgagtgctacaaggtgaccaagggacgtgcaatctttgccagcggcagtccttttgatccagtcactctcccagatggacggactctgtttcctggccaaggcaacaattcctacgtgttccctggagttgctcttggggtggtggcctgcggactgagacacatcgatgataaggtcttcctcaccactcgtgaggtcatatctcagcaagtgtcagataaacacctgcaagaaggccggctctatcctcctttgaataccattcgaggcgtttcgttgaaaattgcagtaaagattgtgcaagatgcatacaaagaaaagatggccactgtttatcctgaaccccaaaacaaagaagaatttgtctcctcccagatgtacagcactaattatgaccagatcctacctgattgttatccgtggcctgcagaagtccagaaaatacagaccaaagtcaaccagtaacgcaacagctaggatttttaactttattagtaaaatcttgaagttttcatgatctttaagggtcagaatcttttatgatgattcatagagagcttagaataaggtgattttagtttaataacaactcatgggagtctattaggataaattaggataaatttcacaccagacggttttgtttcacttactgtggatatttatgttttctctgttgattattctctttatgaattctgtttaaaagctactgtacctgctgctagaaagtcctcactgatatgtaggaggctaatggaagacccactagtaataaattaatatagcataacttgattatatttaagtgcctacagttctttcttgactattttgctaaaatctctaaacagaaaagataaacacaaacttgggtatagctgaacttttactaaacagaagcactactttgttgcctagagaaaaatcttctcaggacttttattccaggcctccgttagctttgttctctttgtacacctgactcaacacctctgagaaagctcactgctgtttacagtacccttgcgtagccttagctcatcagcgtcttctgtcgttgttatgttatatcccatagagtagagctctcgaacccaaacactccataggaaacaccctttctcatctctgagcaaccctggccctgtcgagatatcgggtgtttttgttagtgtagcctgggacgtgagagggctgcaggagggtccttgagacggggccctggaacccacctctgagacaagggagtcagatgccagacagtggttcccagacaagctcaggcctccatgaagatcacctgctctaatgtccctgtgcttagttcggaggactgagagctcatggcatgagtaaatacatctctcaatgcctacctttctatcagatattaaaatatgttaattaccaaaaccattctctgagaaaaaaaaaaccaagcctttccagtgtattaatttactggacacgttgataatggcatgactagaaacagccttaactcctaagtcaggttcaagaacattctgtgtatctagagactcctgactttgaagttgctttaaagcctgtgtggtttccggcgggcaggctctgtacagtgagctccttgaagctttcaaggtgtgagctaaaacgggtacagacttcctaatgacaacattgtgactaacggtttcaacagtgtagttatttgagaaagccatttcagaatttctatcttttcttgtatgtttccatgttgtcaggtagttgtaaatgaatgtatttacctatgcaaaagatttattaaagcctagagaatatg

SEQ ID NO: 2 - DNA, 3419 bp, Mus musculus
gcagtctctttggaaacttctaaaagagctaggaaagagctgcaaagctgtttgggcttttttccccctttttgttcctttttgttaccccccccctcggtctgcacccttctccggacttcacgcagaacctgcgggtttcgaagaggtggtgacagagcaggtgttggggtccaggtttggtgaggtctgggtttttgccctttttcccccctcgatttcaacattttcccgatcttgttgtcagccgccgacgcctcttacctgttctgcggcagcagcgcagctggccgctgagaccgagcggagtggggttgcgttttagattttaagcaaaggggggaaaattaagcccaatccatttttttcttcacctcctcccttttcaaggcctccaagctaattatttctgttgctttggagtgagcaattctgtggttctctccaccaccacccccaattctgacccgatcccgcctgggggtttctacggtctccgctcgctctgcgtgcacctggcgcgcctctttttttcacccccaacctgttgcaagtctttaatcctcgcaattgggacttgcgtgcaggcatctgaatcctccttgcctcatattttgcaagtgtttgggggagagcacctgctctacctgcaagagatttaaaaggaaaaaaatctccaggctccctctttctccacacactctcgctctcctgccccgccccgaggtaaagccagactccgagaaaatggtgatcagcgtggtcctcctgctgctggccgcctatgccgtaccggctcaaggcctgggttctttcgtgcactgtgaaccctgcgacgagaaagctctgtccatgtgtccccccagccctctgggctgtgagctggtcaaagagcccggctgtggctgctgcatgacttgcgccctggcggagggacagtcgtgtggcgtctacacggagcgctgcgcccagggtttgcgctgcctcccccggcaggatgaggagaagccgctgcacgccctgctgcacggccgcggggtttgcctcaacgaaaagagctacggcgagcaaaccaagataagagactctcgggaacacgaggaacccaccacctccgagatggctgaagagacctactcccccaaggtcttccggcccaagcacactcgcatttccgagctgaaggctgaggctgtgaagaaggaccgcagaaagaagctgacccagtccaagtttgtggggggtgcagagaacactgcccaccccagagtcatccctgcacctgagatgagacaggaatccgaacaaggcccctgccgcagacacatggaagcttccctccaggagttcaaagccagcccacgcatggtgccccgtgctgtgtacctgcccaactgtgaccgcaaaggattctacaagagaaagcagtgtaagccctcccgtggccgcaaacgtggcatctgctggtgtgtggacaagtacggaatgaagctgccgggcatggagtacgtggatggggactttcagtgccacgccttcgacagcagtaacgttgagtgacgcgtcccctcccttcctccccctatcctacccccccagccccaactccagccagcgcctccctccaccccaggacgtcactcatttcatctcatttaggggaaatatatatacatatatatttgaggaaactgaggacctcggaatctctagcaagggctaaggagacactccccaccatgaccccggaaatgtattcctttttgaagcaagttgaacggacagagaagggaaggagagaagaagcaagagggagcgagagatggaaagaaagcaaagcgttggaatagaggaaaagagggaaggacagataggattagagagagaagagagaaacagcaaggcagaaaggactccacaaccaaggctgaatctgcccttttgctttcagctctagcctggggtcagaaaaagtgtggcattcagtgacacccagtttagattggtcaaggggagaaaagaaacaaggtgtgtcagtgcctctcgggtctgtcccctcctgcagccagcagtgtggatggctagacccctcaccctcctctcctcttacccaagtgcagggtgatttcatccccaaatttacaaagactaaaatgcattccatccctctgaaaataaacaaaagtgagtgattgaagataggttttcccccagcagacaagtgaactcagaatgtgtgcaaattttactcttgttaaagatttttttaagaagtcagtacgcacccccaacactggaaagacttgattctccagggtgacaagcaattcagaagcgcgtggcttcggcccttgatttcactagactcaaagctggcccggcagcctctgtggaggaggatgagaggtggagaaaaccaaggggcttgtactcacccacaagactccatgtagactttataggcatataaatctattttctttacctttttttccctttccctttctttcgaagttttgcattacctctttaaagtagttttttttaggacactgaagatcttcctcattctgggaaaaatccatatttcacaaatacaacccagaacgccagcttggcctgcgtccaggcagcctttctcgtgagctacaagtgtggctcttttgtggggcaccgatttggatcttctcatgattccaaacgtgtgttgaagtgaatccaccaagccaggtaactgccagcacccaagggtgcatcaagtgcatagcccaggtcaccccatttcagccttccaacccgcagaaagtaactgtctcacaccacaccacataaacctgccagatccatctgtaacccactggcctgcccagacctttttttcccatctgcatttttttttttgaactgcattttgaaagcctccctcagatgccaggctgacagatcagagagaaactaacatgagagatgacagaggaggaggaagtggagggtgggggcagagacttccacagagagacatagaagatggagcagaggtctgggggtggggaggacaagaaagagacagagagaggaaaataccaatagaattttccttggtgtctcccatctaatcaactctctgagatttgagaggaaaaagaaggcaggggaagaacttgaggtagaaatgaggtcagttcaagtcacagggcccagatggtgggtaactgaggcaggatccaaaaaaaatacttatgctttttactggtgaaacagattgaaaaaaaaattgaacaacaaaccagtttgtgaaaaaaaaaaatgggaaaaaaaatcaccccgatgtggaagagctcggctcctctttagcattttggtacttaaggaaataaaaaagaaaaacctggaagatctcacattttattacaaagtga

SEQ ID NO: 3 - DNA, 3064 bp, Mus musculus
atgctccgtggaggcccgcttcggtttctgtcgcggggcccgcggtgtctcctagcgtaaccggaactagccgttgcgggccggccttctctgcgctcgggccttgaggtgatctccgagcgccccggacccctccttcctcgccgtccccctcggctcggccgctcgcctctcacagccgccggcatgagctccaggccgccagcgtcgccgccagcgcaaggctccaggttgctgctgctgtcgctgctcctgctagggacggtcccaggcccgcgcccgggaagcgccttctacctgcccggcctggcgccggtcaacttctgcgccgaagagaagagcaacgagtgcaaggctgatatagaattgtttgttaaccggcttgattcggtggaatctgttcttccttatgaatatacagcgtttgacttttgccaagcgtcagaaggaaaacgcccatctgaaaatcttggtcaggtattattcggggaaagaattgaaccctcaccgtataagtttacgtttaataagaaggaaacctgtaagctcgtttgtacgaaaacatacaatacagagaaggctgaagacaaacaaaagttagacttcctgaaaaaaagcatgctactgaactatcagcatcactggattgtggataatatgcctgtcacgtggtgctatgaggttgaagacagtcagaagttctgtaatcctggatttcccattggctgttacattacagataaaggccatgcaaaggatgcctgtgttatcagttcagaattccacgagagagacactttctacatcttcaatcatgttgacatcaagatatattatcatgttgttgaaactgggtctatgggagcaagattagtggctgctaaacttgaaccaaaaagcttcaagcatacccacatagataaaccagactgctctggacctgccatggatataagcaacaaggcttcaggagagatcaaaattgcctatacttattctattagttttgaggaagagaaaaacatcagatgggcgtctaggtgggactatattctggagtctatgcctcacacccatattcagtggtttagcataatgaactccttggttattgtcctcttcttatctggaatggtagctatgattatgttacgcacgctacataaagatattgccagatataaccagatggactctacggaagatgcccaggaagaatttggctggaaactagttcatggggatatattccgtcctccaagaaaggggatgctgctgtctgtcttcctaggatctggaacacagattttaattatgacttttgtaactctgttttttgcatgtctgggattcttgtcccctgccaatcgaggagccctgatgacatgtgctgtggtcttgtgggtgctactgggcacacctgctggctatgttgctgccagattctacaaatcctttggtggtgaaaagtggaaaacaaatgttttattgacatcatttctttgtcctgggattgtgtttgctgacttctttatcatgaatctaatcctctggggagaaggctcttcagcagccattccttttggcactctggttgccatcttggccctctggttctgcatatctgtgcctttgacgtttattggtgcatactttggctttaagaagaatgccattgaacacccagttcgaaccaatcagatccctcgtcagattcctgagcagtcgttctacacaaagcctttccctggcatcatcatggggggcattttgccttttggctgcatctttatacagcttttcttcattctgaatagcatttggtcccaccagatgtattacatgtttggtttcctgtttctggtgtttatcattttggttattacctgttccgaagcaactatacttctttgctactttcacctatgtgcagaggattaccattggcagtggcgttccttccttaccagcggcttcacagctgtttacttcctgatatacgccatacactacttcttctccaaactgcagatcacggggacagcaagtacaatcctgtacttcggttatactatgataatggttttgatcttcttcctttttacaggaacaattggcttctttgcatgcttttggtttgttaccaaaatatacagtgtggtgaaagtggactgaagaagcccagtgtgtccagttaaaacagaaataaactaaatcttcatccacaaagacctgttttgtgactaccttgagttttctcagacttattggcctagtaatccttcagaaacaacatacttccaagtccacctctcccatgcacctgcacctacaagatgtgtttcaacactaaaacattttgtattgtgattggattaagtatatattcagttgttctcagtgaagagcagatttaaatattatgtgcatttgtaaatacgatagctataaacttttcaatacttctaatggcagattataggaggccataatactgatgaaagactggacagttgattgtaaataggattttctagactcggtaggtggaaagaattattttctctttgaaggaaataactttttatcatggtaattttgaaggatgattcctatgacatgttcattggggggaatgtggcttttaaaaatcttgtattggttataattgttcatatcttcttacttttctgtgttgacttcattattcccatggtattggccttttaaactatgtgcctctgagtctttgaatttataaatttgttatcttaataaatattgtaaaaatgtcttcattgtatcactccctgcatattgaagaaaactctgtgaatacaaatgtgttggccactatactattttattggatgatattgaatactgtggatacacactttctgtttccacttaagtgaaactgtcgggctttgtcaagtctgaattttcactctgaaggaatgataaaaattgtagtcatgcctgtctggtcagataaatgacacatttagaacttaaatgcaggccttatattgttactattaaaaatttacactgtagactt

SEQ ID NO: 4 - DNA, 6423 bp, Mus musculus
  modified_base (6269)..(6269): a, c, g, t, unknown, or other
  modified_base (6348)..(6348): a, c, g, t, unknown, or other
  modified_base (6359)..(6359): a, c, g, t, unknown, or other
  modified_base (6370)..(6370): a, c, g, t, unknown, or other
  modified_base (6387)..(6387): a, c, g, t, unknown, or other
  modified_base (6395)..(6395): a, c, g, t, unknown, or other
  modified_base (6414)..(6414): a, c, g, t, unknown, or other
gggacgtcagtgtgaacgcagtgggtagaccccactcaggacttccgctgaattccagcgggtgtagtgggagaagcatccccggggagccgcaggcttcgctgtcccgactgagtttatcttggcctgagggcagcgtgctgagcgatctaacccagcagggaagctcctcttgcctccatctgggtcaggcactttaaaccgaagccgacttgaccatgcctctggcgcgatgaagactccggagaacttggaggagcctagcgccacgccaaaccccagtaggacccccacggagagattcgtttatctggaagcgctcctagagggaggggctccctggggcttcaccctgaaaggtggcctggagcgtggagaaccgttaatcatttccaagattgaagaagggggcaaagccgactcagtgagctccggactgcaagctggggacgaagtcatacacatcaatgaggtggcgctgagcagtcccaggagagaggctgtctccctagtgaaagggtcctacaagaccctgcggctggtggtgcgcagagacgtgtgtgcggccccgggccatgctgatcctggtacctctaagtccctcagctcagagctgctcacctgcagtccccagcaccggaaagcaacatggtcaggaggggtgaagcttcggctaaagcagaggtgcagtgagcctgccactcgccctcactcgtggcataccaccaaatttggggagacacagcctgatgtcagcatgatgcagatatctcagggcacaatgggccctccttggcaccagagctaccattccagctcttcgaccagtgacctctccaactacgaccatgcttatctgaggcggagccctgaccagtgcagctcccaggggagcatggaaagcctggagcccagtggcggatacccaccctgccatctcctttctcctgccaagtccacgagcagcatcgaccagctaggccaccttcataacaaaagggactccgcatatagctccttctccaccagttcgagcatcttcgagtacccaccccctggtggctctgcccgagaacgttcgggttccatggacgtgatttctgcccggggcggcctcctagaagggatgaggcaggcagacatccgctacgtcaagacggtctatgatacccggagaggagtatcttcagagtatgaggtgaacccttcagccttgctccttcaaggtagggatgcccatgcctcagccgacagtcagggctgtgctaaatggcacagcattcctcggggcaagggaacgccttccccgtcttggagccagcagtgttctggttccctggagactgctactgacaacctgccccagaaggcaggcgcacccctgccccccacccgcagtgatagctatgcagccttccgccatcgcgagcgtcccagctcctggtccagccttgatcataaaaggttctgccggcctcagacaaactcttcaggctcccagaaaaccccattcgctgaggaccagctgcatacagtcccagagaggagtccagagaacagccccccagtgaaatctaagcataattatacccagaaggcgcagcctggccaacctctgctgcccactggcatctatccggtaccttctccggagcctcactttgcccaggtgccccagccctctgtgagtagtaatggcaccgtctaccctgcgctagtcaaagagagtggatacacagctgctcagggaacctgtaacaagatggctaccttagatgagaacgggaatcaaaatgaagctagcaggcctgggtttgccttctgtcagcccctagaacacaactcggtgactccggtggagaaaaggccagaacccacggccaaatacatctacaaagtccatttttcttcagtgcctgaaaatgaagactcctccctaaagaggcacatcacacctccccacggccatagtccatatcccagcgagagaaagaacatccacggtggcagcagagcgtgttccaatcaccacagtctctcgtccccccaggcccaggccctgcacgtgggtgatgacaggaagccttccaggctctctcagccctgggagggtgactttcaggaagatcacaatgccaacctcaggcagaaagtggagagggagggccaaggccagggcctgtctggcaactctggcaggaccagatcggccttctcatctctgcagaatattccagagagtctgagaagacaaagcaacgtggagcttggagaagcccaggaggttcaccccgggggcaggtccaaggtggaggaccctggaaggaaagcaggggcttcagacatcaggggctacctggacagatctgtttcctatccgaggcccgaggggaaaatgaacgccgtagactccgtccacagtgcagactccaggtatgaggagtccccggccccagcgctgccacagacatccggtgcgagccagcggcggctcagctccagcagctccgccgccccgcagtacaggaagccccattgctccgtgctggagaaggtttctagaatagaggaacgagagcaggggcgccacagacccttgagcgtgggcagctctgcatacggcccgggcaacaggcctgggaggaccggcccgacccccagtacttccagcagtgacttggacgatccaaaagccggcagcgtccatttctcggagtccactgaacacctgcgcaatggggagcagaaccccccaaacggggaggctaagcaggaagaggcttcccggccccagtgcagccatttgatccggagggcccctgcggacggccgtggacctcctgcccgaggcggcgagccctcaaggccggaggcccgcctgctccgcagccagagcacctttcagctctacagtgaggcggagagggaagcctcgtggtcagaggacaggcccggtacccctgagtcgcccctgctcgatgcgcctttcagccgcgcctacagaaacagcatcaaggatgcccagtcccgcgtcctgggggccacgtcgtttcgtcgccgagacctggaaccgggcacccccgccacctcgaggccctggcgcccgcgacccgcctccgcccacgtggggatgcggagccccgaggccgcggtgccctcgtcctccccgcacacccctcgggagcgacacagcgtgaccccggccgcgccccaggctgcccgccgaggcccacgccggcgcctcactgtcgagcagaagaagcgctcctactcggagcccgagaagatgaacgaggtaggggtctcggaggaggccgagcccacgccctgcggcccgccgaggcccgcgcagccgcgcttctcggagagcaccgtggccgaccggcgccgcatcttcgagcgcgacggcaaggcctgctccacgctcagcctgtcgggccccgagctcaagcagttccagcagaacgccctggccgactacatccagcgtaagacgggcaagcggcccacaggagccgcctcgcacaccggaggccgggctgcgcgagcgcgcacagagcgcctacctccaggccggccccgcggcgcccgatggccccggctggcctctgcctgtagcctgagctccctgcgagagcccgaggcgctgccccgcaaggagcacactcatccgtcggccgcggacggcccgcaggcgccccgtgatcgcagcagctccttcgccagcggacgcctagtcggggagcgacgtcgctgggaccctcaggtccccaggcagctgctcagcggagcgaactgcgaaccgaggggcgtccagaggatggacggggccccgggcgggccgccttcctggggcatggtggccgggaaggccgggaagtccaagtcagccgaggatctgctggagcgctccgacacactggcggtccctgtgcatgtgaggtccaagtcgtctcccacctccgacaagaaaggtcaggatgtgctcctgagggaaggcagcaactttggttttgtaaaggatccatgctgtttggctggccctggacctaggtctctcagctgctcagacaaaggccagaatgagctggcattgcccctgcaccaccatacgccctgctggaacggctcaggctgcaaagccactgtggcttcctcagctcctcccgaatcttctggagccgcggatcatctgaagcaacgtagagcgcctggtcctaggccactctcagcaggaatgcacggccacttcccagacgccagagctgcctcactcagctcccctctgccatcacctgtcccctctgcatcacctgtcccctccagttaccggtcacagcttgccatggatcagcagactgggcaacagcctccctcatcccctgcctctgcagtgacccagcctaccagtccaagaagccttgagctcagcagcccagcatatgggctaggggaggggatgtggaagaggacatccctgcctcagcgaccccctcccccttgggtgaaatgggcccacgcggtcagagaggacggccttgctgaggacaccttggcgcctgagtttgcgaacctgaagcactatagaaaccagccgagtcgtccgagttcctgcagcacttctgacccagacactccaggaaggatctcgctccgaatatcggagtcagcccttcaaccttccccaccgccccggggggactatgatgacgaagtgttcatgaaggacttgcaccccaaggttacttcaagccccacatttgaagctcttcccccacccccgccaccttcgccaccgagcgaggaacctctagtgaatggcacagatgactttcctccgcctcctcctccccaagccctgtgtgaggtactgctggatggtgaggcatccacggaagctggcagcggcccctgcagaattcccagggtgatggtcacaagggaagggcacgtgcctggggcagcccattccgaaggtagtcagataatgactgccacaccaccccaaacctcggccaaaggttcagaagccgagtccaacacgccttccagcgcgagcgcccagcctcagctcaacggttctcctggcaagcagctctgtcccagccagacccgaaacctcacttatgaacctgtcgagagaactcaggatctaggaaagaaaactcacgccgagcctcagaagacctcagaagatatccggacagaggctctagccaaggaaattgtccaccaagacaagtctctggcagacattttagatcctgactccaggatgaagacaacgatggacctgatggagggtttattccctggagacgccagtgtgctgatggatagtggcgcaaagaggaaagccttagacatcaccgccaggcgtgcgggatgtgaagccaaggcgagcgaccacaaggaggcagtgagtgtgctggtcaactgtcctgcctactacagtgtctctgctgccaaggcggagctgctcaacaaaatcaaagacatgccggaggagctgcaggaggaggaggggcaggaggatgtctatgagaaaaaggctgagcttatcggaagcctcacccacaagctggagagtctccaggaagccaaggggagcctgctcacggacatcaagctgaacaatgccctgggagaggaggtggaggctctgatcagtgagctctgcaaacccaacgagtttgacaagtacaagatgttcataggggacctggacaaggtggtcaacctgctgctgtccctgtctggacgcctggcccgcgtggagaacgtcctcagaggccttggtgaagacgccagcaaagaggaaaggagttctctgaacgagaaaaggaaggttctggctggccagcacgaggacgcacgggagctcaaggagaacctggaccggagggagcgcgtggtgctggatatcctggccaactacctgtccgccgagcagctgcaggactaccagcacttcgtgaagatgaagtccacactcctcattgagcagcggaagctggatgacaagataaagctgggccaggagcaggtcaggtgcctgctggagtcgcttccctcggacttcaggcccaaggcaggggccatctccctccctccagccctcaccgggcatgcgactcctgggggaacatctgtattcggtggcgttttcccaacgttgacctctcctctttaatcgctcctgttagccctgggcaaaagctgccactctcaccactgttcaatctgaaaacgaattcctacaaactgcngtttgaattgttggttctgggggcctcctgaattacaagaaaaagctttccaagaaatctctcttgcctttcacagttnggtcttctgcnaacctgccccnctgtggaaaaaaaatcngtgacctnccgcctaatggaaggtttntggcaccgg

SEQ ID NO: 5 - DNA, 2701 bp, Mus musculus
ggtcccgacgcgtctccgccgccctcgccctcgccctcgcctccgccgtacagccgaatagccgaggacccacgcagagccaccaaccagccaagatgcccaagccaatcaacgtccgggtgaccaccatggatgccgagctggagtttgccatccagccaaacaccaccgggaagcagctctttgatcaggtggtaaagacgattggcctccgggaagtgtggtacttcggcctgccgtatgtagacaataaaggatttcctacctggctgaaacttgataaaaaggtctccgcacaggaggtccgaaaggagaaccctgtccagtttaaattccgggccaagttctaccccgaagacgtggccgaggaactcatccaggacatcacacagaagctcttcttcctgcaagtcaaggacgggatcctcagcgacgagatctactgccccccagagacagccgtgctcctgggctcctatgccgttcaggccaagttcggagattataacaaggaaatgcacaagtctgggtacctcagctcggagcggctgatcccccagagagtcatggaccaacacaagctcagcagggaccagtgggaggaccggatccaggtgtggcacgcggaacaccgagggatgctcaaggacagtgctatgctggaatacctgaagattgcccaggacctggaaatgtatgggatcaactatttcgagatcaaaaacaagaaaggaacagacctttggcttggagtcgatgcccttggacttaacatttatgagaaagatgacaagttgaccccaaagatcggcttcccttggagtgagatcaggaacatctctttcaacgacaagaagtttgtcattaagcccatcgacaagaaggcacctgactttgtgttctacgccccgcgcctgagaattaacaagcggatcctgcagctctgcatggggaaccatgagctgtacatgcgccgcaggaagcccgacaccatcgaggtgcagcagatgaaggcccaggctcgggaggagaagcaccagaagcagctagagcgacagcagttggaagccgagaagaagaggcgagagacggtggagagagaaaaggagcagatgctccgggagaaggaggagctgatgcttcggctgcaggactacgagcagaagaccaagagggcggagaaagagctctccgagcagattgagaaggccctccaactggaggaagagaggaggcgagcccaggaggaggctgaacgtctggaggccgaccgcatggccgccctgcgggccaaggaagaactcgagagacaggcgcaggatcagataaagagccaggagcagctggctgcagagctggcagagtacacggccaagatcgcactgctggaggaggcgcggaggcgcaaggaggacgaggtagaagagtggcagcaccgggctaaagaagcccaggacgacctggtgaagaccaaagaggagctgcacctggtgatgacggccccaccgcccccaccgcccccagtgtatgagcctgtgaattaccacgtgcaggagggactgcaggacgagggagcagagcctatgggctacagtgccgagctctccagtgagggcatcctggatgaccgcaacgaggagaagcggatcacagaggcagagaagaatgagcgcgtgcagcggcagctgctgaccctgagcaatgagttgtcccaggcccgggatgagaacaagaggacccacaatgacatcatccacaacgagaacatgcggcaaggcagggacaagtataagacgctgcggcaaatcaggcagggcaacaccaagcaacgcattgacgagttcgaggccatgtagaggccaggctgggaccaagggcagagggcacctcactgcaggcaggtgtcacacttggctctttagttctcttaagtttagacacccccttgctgtgttccagtcccttaaagagcagttacggggcctgcattctgccccgagacccagtgggctcctccttggttccttctaattgtatcacatagtgccaaacaggtcagatttaatgacagttaccgaatcacttcctgtttggagcagggattcggagggctggccctcatgaagcaagattcattgtcactgggacagcactgtggctcacgggtgccatacttttctctagttttacaatgagctcaaatcgattttgttcttgatttttatgaaggatccatctctgtgtattgaggggtaaaaatgattttgaaatttgagtctaaagcatgcccccacagagtctccttcctccagaccgctggcagagtctccaggggtccttcagagtgtacgggtacaggactctccgatacaaaattctcatgcttatctgttagcatacattgttggacttatatatctaatgatctgctatagaggatagtatttatatataagccgataatatgggtttgtaacattagttttaaaaaagggaaagttttgttctgtatattttgttaccttttacagaataaaagaattcaacaccaagaaccatgtaaccgagacacttgatctgacacaggggcagtcgggaaaccgatgactgcagtaatcaccactgtacaaaaatgttagtgggttttgtgcacgtaaaatgcacacttccgatttcctgtcagtttcttatttgaaaaccc

SEQ ID NO: 6 - DNA, 1398 bp, Mus musculus
atgaagcctctgctcctgctcgtcgctgtggcactgggcctagcgaccgtcgtctccgtcgtctcggctggaccagaggcgatcgagtgctggttcgtggaggatgcaggtgggggtggcctgtctaagaaacctgccacactgctactgcgccatggacccaggggaccgccgccccggccagatcttgacccaaagctatacttcaaggtggatgacccggcgggaatgctcctggccgccttcaggcggtaccccgcaggcgcctccgccccacactgcgagatgagccgcttcatcccgttccctgcctcggcgaagtgggctagaagtctgagtccggagcagaactgcccgcgggccctggacggggattggctgctggtcagcgtatccagcactctcttcagcctctccagcctgctgcgaccacagccggagcctctgcgggagcctgtcgtcatcaccatggcaacagtggtgctgaccgtcctcacccataaccctgcccctcgagtccagctgggaaaggatgcagtgctggacctgcgcttcgcctacgcaccctccgccctggaaggttctccctctctggacgcaggccctcctccctttgggctggagtggcgacgccagcacaggggaaagggtcacctgctgttggctgccacccccgggctggccgggagaatgccaccagcccaggaaaaggctacggcatttgcagcttgggatgacgatgagccctggggcccgtggactgggaatgggaccttctggcttccagccgtgaagccttctcaggagggtgtctacctggctacggtacacctgccctacctgcaaggacaggtctccctggagctgactgtgcacaaggcccccagagtgtctctaacaccagcacccgttgtgtgggctgccccaggagaggcacccccagaactgctctgtcttgcatcccacttcttccctgcggagggtctggaggtcaagtgggagctcagaggcggcccaggaggaagttctagaaaggttgaggggaagacgtggctctccaccatccgccaccattccgatggctctgtcagccagtctgggcacctgcagctacctccagtcactgccaagcagcatggagttcactatgtctgtcgggtgtaccactctagcctgccagcatcggggcgcagtgctgacgtcaccctggaggtggcaggcttctcagggccctccatcgaggacggcatcggcctgttcctgtctgcttttctcctcctcggactcctcaaggtgctaggctggctggctgcctactggaccattcctgaagtctcaaaggagaaggccacagctgccagcctgaccattcccaggaactcaaagaagtcacagtaa

SEQ ID NO: 7 - DNA, 3225 bp, Mus musculus
gggccacaccccgcgcacggcccaggcgcttcccgccggttgaatcatccccgcagcagcgctcccgcagtccgctgcagcccccgggcccggccgcgccccagccgagtgccgtgccccgcctctccgcgacccctttctccgtgcagtgcgccaaccggatcgctaccatggcgggcatcgcgataaagctggccaaggaccgcgaagcggccgaggggctggggtcgcatgagagagccatcaagtacctcaaccaggactacgagacgctgcggaacgagtgcctggaggccggggcgctcttccaggatccttccttccccgccctgccgtcatccttgggctataaggagttggggccctactccagcaaaactcggggcatcgaatggaagcggcccacggagatctgcgctgacccccagttcattattggaggagccacccgcacagacatctgccaaggagccctgggggactgctggctgctggctgccatcgcctccctcaccttgaatgaggaaatcctggctcgggttgtgcctccagatcagagcttccaggaaaactatgcaggcatcttccacttccagttctggcaatatggcgagtgggtggaggtggtggtggacgacaggctgcccactaaggacggggagctgctctttgtgcattcagctgaagggagtgagttctggagtgcccttctggagaaagcctatgccaagatcaatgggtgctatgaagcactctcagggggtgccaccacggaaggctttgaagacttcacaggaggcattggtgagtggtatgagctgaggaagcctcctcccaacttgttcaagatcatccagaaggctttggagaaaggttctctgcttggctgctctatcgatatcaccagcgctgcagattctgaggccgttacgtaccagaagttggtgaaaggacatgcgtactctgtcaccggagccgaggaggttgaaagttcaggaagcctgcagaaattgatccgcatcaggaatccctggggacaagtagagtggaccgggaagtggaatgacaattgccccagctggaacacggttgacccagaagtaagggcaaatctaaccgaacggcaggaggacggagaattctggatgtccttcagtgacttcctgagacactactctcgcctggagatctgcaacctgaccccggacaccctcacctgtgactcctataagaagtggaaactcaccaagatggatgggaactggaggcgaggctccaccgcagggggctgcaggaattacccaaataccttctggatgaaccctcagtacctaattaagctggaggaagaagacgaagatgaggaggatggggagagaggctgtaccttcctggtgggtctcatccagaagcaccggcgacggcagaggaagatgggcgaggacatgcacaccattggcttcggcatctatgaggttccagaggagctaacagggcagaccaacatccacctcggcaaaaactttttcctcacaacccgagccagggagcggtcagataccttcattaacctccgcgaggtcctcaaccgcttcaagctgcccccgggagagtatgtcctcgttccctccaccttcgaaccccacaaggatggcgatttctgcatccgagtcttctcggagaagaaggctgactaccaagctgttgatgacgagatcgaggccaacattgaagagattgacgccaatgaggaggacattgacgatggattccgaaggctctttgttcagctggctggagaggatgcagagatctctgcctttgagctgcagaccatcttaagaagagttctagccaaacgccaagacatcaagtcagacggcttcagcatcgagacctgtaagatcatggtggacatgctggatgaagatgggagtggcaagcttggcctgaaggagttctacatcctctggacgaagattcagaaataccaaaaaatctaccgggaaatcgatgtggacaggtctggaaccatgaattcctacgagatgcggaaagcactggaagaagcaggtttcaagctgccctgtcaacttcatcaagtcatcgttgcccggtttgcagacgacgagctaatcatcgactttgacaattttgtgcggtgtttggtccgtctggaaacgctattcaagatattcaagcagctagaccctgagaacactgggacgatacagctcaaccttgcttcgtggctgagtttttcagtactctgaagttacatgcctggagaggtctagtgggagaaaacaaccaatgactacacttagacactttgtatctggaccttgaacttacgggaacattgacttcatcggatgattataactgaagaatataaccgtctgggatagatgaacttttcacatatcagagtaacatatttgcatattattaaaccaaatgcaaatgaattgcataacccttggtaaggtcagaggaagcgttacacctgtaaatagtatatcctttttacttctacacattgtcctggccatagcaatattaaatcaggaaggaatgcagagagctttaaataactgggcaaatagtaaaccaatctcagaggctacaaggccttgatgggaatatttgaagaaattttaacttttaaatgcagtggtggcacctgccacagcagcccagagactgccgcttgccctgagcgaactgagaaatacaatgacgaagtagtctgatggaggcatctaaagaacccagtctgatggaggcatctaaagaatccaggagccaggagtgtctgacacaaggccaacctgggctgcctagcaagacccgatctcagaaaataaatgccaatttaaaaaaagggcatgcttgcttccatcatttggttctaacagaagatggtttttatatacctttagcattcttaaactcaagtccttgaccatatttggccttagacacttaggtctgacaagtagtaagtaatgagatcactctgaccaactgagccaggtgtgccgtctgcaagaagatcgtgataaaccccagggactgtgcctacagctggggaggacagggctcagaagatcttcttaaaacaaccaagctggcttcttcatcctgggaaaatgctagcaaccatacagacatattgccttatctacttccaaacgtactgttaataaagagttacaacac

SEQ ID NO: 8 - DNA, 3701 bp, Mus musculus
cgcggagcggccgaggcccgccgacgccacccgagaccaaccgagaagccgaggcccgccgacgccggcccgagaccctccgaaaggccgaggtccgccgacaccgacccgagaccctccgagaggcggaacgcggcggagcccgggccgcccgcgtgtcgggcggacgctgcgaaaagatgaatttgcaactggtttcctggattggattgatcagtttgatttgttctgtatttggccaaacagataaaaatagatgtttaaaagcaaatgccaaatcttgcggagaatgtatacaagcagggccaaattgtgggtggtgtacaaatacgacatttttgcaagaaggaatgcctacttctgcacgatgtgatgatttagaagctttgaaaaagaagggttgccagccaagtgacatagagaatcccagaggctctcaaactataaagaaaaataaaaatgtcaccaatcgcagcaaagggatggcagagaagctccggccagaagacattactcagatccaaccacaacagctgcttctaaaattgagatcaggagaaccacagaagtttacattaaaattcaagagggctgaagattaccctattgatctctactaccttatggatctctcctactctatgaaagatgatctggagaatgtgaaaagtcttggaacggatttgatgaatgaaatgaggaggattacttcagacttccgcattggctttggctcatttgtggagaaaactgtgatgccgtatattagcacaaccccagcaaagctaagaaatccttgtacaagtgaacaaaactgcaccagcccatttagctacaaaaatgtgcttagtcttactgacagaggagagtttttcaatgaacttgttggtcagcaacgcatatctggaaacttggattctccagaaggtggctttgatgcaatcatgcaggttgcggtttgtggatcgctgattggctggaggaatgtaacacgactgctggtgttttccacggatgctgggtttcactttgctggagatgggaaacttggtggtattgttttacccaatgatggacaatgtcacctggaaaataatgtatatacaatgagccattactatgattatccttcaattgctcaccttgttcagaaactaagtgaaaataatattcagacgatttttgcagttactgaagagttccaacctgtttacaaggaattgaagaatttgattcctaagtcagcagtgggcacactgtctggaaactctagtaatgtgatccagctaatcatcgatgcctacaactctctttcttcagaagtcattctggaaaatagcaaattgccagacggagtaacaataaattacaaatcctattgcaagaatggggtgaatgggacaggagaaaatggacgaaagtgttccaacatttctattggagatgaggttcaatttgaaattagcataactgctaataaatgtccaaataaggagtctgaaaccattaaaattaaacctctgggcttcactgaagaagtagaggtcgttcttcagttcatctgtaagtgcaattgtcaaagccatggcatcccagccagtcccaagtgccatgagggaaatgggacatttgagtgtggagcctgcaggtgcaatgaggggcgtgttgggaggcactgtgaatgtagcacagatgaagtgaacagtgaagacatggacgcttactgcaggaaagagaacagttcggaaatctgcagtaacaatggagaatgtgtctgtggacagtgtgtgtgtaggaagagagataatacaaatgaaatttactctggaaaattctgcgagtgtgataacttcaactgtgataggtctaatggcttaatttgtggaggcaatggcgtgtgcaggtgtcgtgtttgtgaatgctatcccaattacactggcagtgcatgtgactgttctttggacactggtccatgtctagcgtcaaatggtcagatctgcaatggccggggtatttgtgaatgtggtgcttgtaagtgcacagatcccaagtttcaagggccaacttgtgagacatgtcagacctgccttggcgtctgtgcagagcataaagaatgtgttcagtgcagagccttcaataaaggagaaaagaaagacacgtgtgcacaggagtgctcccacttcaatctcaccaaagtagaaagcagggagaagttgccccagccggtgcaggtcgatcctgtgacccattgcaaggagaaggacattgatgactgctggttctatttcacctattcagtgaatggcaacaatgaagctatcgtgcatgttgtggagactccagactgtcctactggtcccgacatcatcccaattgtagcaggcgtggttgctggaattgttcttattggccttgccttgctgctgatttggaaacttttaatgataattcatgacagaagggaatttgctaaatttgaaaaggagaaaatgaatgccaagtgggacacgggtgaaaatcctatttacaagagtgccgtgacaactgtggtcaatccgaagtatgagggaaaatgaatcctactcaggcggattttgcaacaccaagctcacagcagcagcatcttagtcacagtagggtagttttggggctctgtggccagggttttattcacatgcaggtttggaaaatgtacaatatgtataatttttaattttttattattttgaaaataatgttataatccatgccagggactgacagaagacttgagaaaggatctttatccttgtcagctgaggtcacagtgtgcctttttaacccttccttctggaccattggaatcaagctctcactagattgaatgacactgctagtgccaatgcagggcagagctgagcagcgtcgcagcatctgaaccatgactgattttcagcttcacagggtggccagggctggttatacagaatcaaagaacagtccttgctggtggctttgttctttgtttagcctgctggctgccctctgggaattcccagtgatgtatgtggaagacaagagtgttgacagtttccaattaaaataaaattgacacagttgatgttcaagtccattggaaaaattctgagaggtgggaaggaaatcttagctttaaaacctgtgtgccattgtgagttacttgatcctgtaactccgacgccttttctttataaatccaaccttggataaaagtactgggaacttctctgctaaaaagtccctgacttagcactattcacataaaggccataattttagtagcattgctgagtggggaccttttgggttgagcttattttaccttttttttttctttaattcctggtgctcctttatcaccttctctaatcttttaatgtgtctgtttgcaatatgggggttagactttttatcattaccttttcttttccttggctgtacatttacctttttcacaaatactgtaagctgtcctgctgcttgcaggactacagggcctgggcagggccccccagcaacaattcacccacagtgcacctgcacatgcctttcctacatgcttgctctgtctcgaactagtcacaatcttgttttaagtgccttttcattttgacagtgctattaactgaagttatttattaaaataaaaaggcctaaatacattaaaaaaaaaaaaaaaaaaa

SEQ ID NO: 9 - DNA, 3071 bp, Mus musculus
cagcacttttctttcattgggggaaaggcgtgagggaagtacccaacagcagcagactttgaaactttaaacagacaggtctgagagcccgaactctccttttcctttgacttcagcctccaaggagttccaccactttggcgtgccggcttcactttcattaagtgaaagagaggtgcccagacatgggtgactggagcgccttggggaagctgctggacaaggtccaagcctactccacggccggagggaaggtgtggctgtcggtgctcttcattttcagaatcctgctcctggggacagcggttgagtcagcttggggtgatgaacagtctgcctttcgctgtaacactcaacaacccggttgtgaaaatgtctgctatgacaagtccttccccatctctcacgtgcgcttctgggtccttcagatcatattcgtgtctgtgcccacactcctgtacttggctcacgtgttctatgtgatgagaaaggaagagaagctgaacaagaaagaagaggagctcaaagtggcgcagaccgacggggtcaacgtggagatgcacctgaagcagattgaaatcaagaagttcaagtatgggattgaagaacacggcaaggtgaagatgagaggtggcctgctgagaacctacatcatcagcatcctcttcaagtctgtcttcgaggtggccttcctgctgatccagtggtacatctatgggttcagcctgagtgcggtctacacctgcaagagagatccctgcccccaccaggtggactgcttcctctcacgtcccacggagaaaaccatcttcatcatcttcatgctggtggtgtccttggtgtctctcgctctgaatatcattgagctcttctatgtcttcttcaagggcgttaaggatcgcgtgaagggaagaagcgatccttaccacgccaccaccggcccactgagcccatccaaagactgcggatctccaaaatatgcttacttcaatggctgctcctcaccaacggccccactctcacctatgtctcctcctgggtacaagctggtcactggtgacagaaacaattcctcctgccgcaattacaacaagcaagccagcgagcaaaactgggcgaattacagcgcagagcaaaatcgaatggggcaggccggaagcaccatctccaactcccacgcccagccgtttgatttccctgacgacagccaaaatgccaaaaaagttgctgctggacacgaactccagcccttagctatcgtggatcagcgaccttccagcagagccagcagccgcgccagcagcagacctcggcctgatgacctggagatttaaacaggcttgaacatcaagctgccaatcgattgtggaggagaaaaaaaagggtgcttgcagaacgtgcacctggggtgttcatttcgttcccgtggaggtggtactcaacaacctcagtaatgaggcgtagaaaacaaagacattacaatatctaggttccttggggggtgttttgggatagctaggcggcaaaagtagggaaaggggaggtatgtaacggtatttaatgtagaagattcaaagagcttaaattctagtaagagtctcattggatgaaacatagatagggctttctctctctgccccccaactgaaccttaagaatggttctgtatacatgagtgagtgggtgatatatattttttttaatttttgttttactgagattctgccatagagctttgagcaggaatccaagtcctcaacatggcatttcctttatgaaaagacaggttgtcctacatccccgctaaaaaacattccagtgtttaaaaacttggcagtttgcaggcgagcttccctggcctgaccctctaggtgtggatggaccttatgctactatacacgattttcattcttggtaggtatcaattcgaagttcagacaaggttcaaagaaaaagattgcccatgtatttgcatctcagtgggttctttttcaaatctgtcccacctttgtgtcttccatatattatcctcagctggtcctcaccctcaccaaatgatttctatcgacatttttaaaacagtgagaaagtcttttttttttttttttgagttagcatcagggaggcaagccatgctcaatatttaacaatcgcttctgtctatgtgtgggtgtgcaagtgtgtaagcgtgtgttttgtcattattggtacaagcagaggcagtataaactcacagatttgaatcgaattcacacagtgttcaaatttgaaccttcctcatggatctttgtggtgtgggccaacgtggtgtttacattatagaattcctgccgtgcaaaagtgtaaagcacacactttttccctaaaatattttttccacgtatcctattatggatactggttttgttaattatgatttttttttcttttttagaatgtagcagtaatagccattactgaaatgaatgatttcctttttctgaaatataatcattgatgcttgaatgatagaattttagtactgtaaacaggctttagtcattaatgtgagagacttagaagagggttgcttagagtggactatcaagtgagcctaaaggaactttgtagtaactggtaatctggtaatttttgtcctacttaactacacattaactcagaacttgtattctgagtttaacagtcttttagattgacgagcaacttggatgtttgcactaagattttctttgagatactagagggggtgaaggagttttcagcagtgcacatgtaactaatttatttgaactgtaagctaaagacacctaccagtttcttcaagtgacttaaaaaaactcatcacagatgattgaaatgtcgagttatcatgtttcctcttgcgcgccagctacacaaggagtttttggacaatgagaaactaatttgtttgacattccatgttaaactactgtcatgttcagcttcattgcatgtaatgtagacctagcccatccaatcaatgtgctcgggaaagtgttctttattcaataaaattttaatttagtataataaaaaaaaaaaaaaaaaaa

SEQ ID NO: 10 - DNA, 5134 bp, Mus musculus
ggccgactccgggaagaaaagaacatggctcctgcggcagagggcggcggcactcccgggcgcgctgggcgccagtgagcgccatggttaactccagacgcgtgcagccgcagccgcccggggacgcgggacgctcgcccgcgccgcgagcgtccggacccgggcgcctggtggcgggaggcgccggcctagctgtccccggcggcctcggggagcagcggggcctggagatcgagatggagcgcatccggcaggcggccgctcgggatcccccggccggagcctcggcctcgccgtctcctccgctttcgtcctgctccaggcaagcgtggagccgcgacaacccgggctttgaggcagaggaggatgacgacgacgacgaggtggaaggagaagaaggagggatggtggtagagatggatgtggagtggcgcccgggcagtcggaggtcggcctcctcctcggccgtgagctcggtgggcgcccgcggccgagggctcgggagctaccgcggcgcggctcacctgagcgggaggcggcgccggctagaggaccagggcgcgcagtgtcccagccccgcgggcggcggggacccgctgcatcgccacctcccgctggagggccagccaccccgagtggcctgggcagagaggctggtgcgagggctgcgaggtctctggggaacaagactcatggaagagagcaacgccaaccgagagaagtacctgaaaagtgtgttacgggagctggtcacttacctctttttcctcgtagtcttgtgcatcttgacctacggcatgatgagctccaatgtgtactactacactcggacactgtcacagctattcatagacaccccagtgtcgaaaacagagaaaaccaactttaaaactctttcttccatggaggacttctggaagttcaccgaaggctccttcctggatgggctgtactggaaggcacagaccagcaaccacacgcaagctgacaaccgaagctttatcttctatgagaaccttctgctaggagtgccgcgtctacgccaactccgagtcagaaacggatcctgctccatccctcaggacctgcgagatgaaattaaagagtgctatgacgtctactccgtcagcagtgaggacagagctccatttggaccgcggaatggaactgcgtggatctacacaagtgagagggagctgaatgggagcagtcactgggggatcattgcgtcgtacagtggagcgggttactacctggatctgtccagaaccagggaggagacagccgcccagcttgcgggcctcaggaggaacttctggctggaccggggcacgcgggcagctttcatagacttctcggtgtataacgcaaacattaacctgttctgtgtggtcaggttattggcggagttcccagcaacgggtggcgtggtaccctcttggcagtttcagcctgtaaaactgatccgctatgtcacagcctttgatttcttcctggcagcctgtgagatcatcttttgtttctttatcatttactatgtggtggaagagatattggaaattcggattcacagactgagctatttcaggagtttctggaattgtctggatgttgtgattgtcgtgttatctgtagtagctatggtgattaacatttaccgaatgtcaaatgcagaggggctgctacagtttcttgaagatcaaaattctttccccaactttgagcatgtggcatactggcaaatacagttcaacaatatagctgctgtcatggtatttttggtctggattaagctcttcaaattcatcaattttaataggaccatgagccagctctccacaaccatgtctcgatgtgccaaagacctcttcggcttcaccataatgttctccatcatcttcttggcatacgcacagctggcataccttgtcttcggcacccaggtcgatgacttcagcactttccaagaatgtatcttcacccagttccgcatcattttgggtgatatcaacttcgcagagatcgaggaagctaaccgagttttggggccactttattttactacatttgtgttctttatgttcttcattcttttgaatatgttcctggcgatcatcaatgattcgtactctgaagtgaaatccgatctggcccagcagaaagcagaaatggaactctcagaccttatcagaaagggctgccaaaaagcactggtcaaactaaaactgaaaagaaacactgtagatgccatctcagagagtctccggcaaggtggtggcaaactgaactttgatgagcttcggcaagacctgaaagggaagggccatacagatgcagagattgaggccatattcactaaatatgaccaggacggcgaccaggaactgactgagcgtgagcatcaacagatgagagatgacttggagaaagagagggaggacctagacttggaacacagctctttaccacgtccgatgagcagcagaagtttccccagaagcctggatgactctgaggaggaggatgacgaagacagtggccatagctccaggaggaggggaagcatctccagtggggtttcctatgaagagttccaagtactggtgaggcgcgtggaccgcatggagcactccattggcagcatcgtttctaagattgacgccgtgattgtcaagctggagatcatggagcgggccaagctgaagagacgagaggtgttaggacggctgctggatggcgtggctgaggatgcgcgactgggtcgggacagtgagatccacagggagcagatggagcgcctggtgcgggaagagctggagcgctgggaatcggatgatgcagcttcgcaaacaggtcatggtgtaagcacacaagtgggactcggtggccagccgcaccccagaaactcgcgccctccttcctcccagtctgcagagggcctggaaggtggaagtggaaatggaagtgctaacgtccatgcctaataatccacacgtgtttgtgtgttcctgagacaccgagaggtggcggctgtccagtacgacaatgataagttcggtatttatataccccggctgcattatgatgctggtctttgtgaccaattgttataattttctgcactttaatttattttacataaacttaaacccgtggttcaaggaaggttgtcttacttttctcatgtgagaaatctagatgtaaatattgagttcagaaagaagaaaactttgaaagtatgctgagttgctgccctgcccgtgtcttcaggtgacagtgtttggaagttagaggagagccttcactagtctctgagttcgtgtggagccaccacagtctgctgcattagtctagtgcgagatgctaaggaaaaacatgacatttcattccactgaggtataactcggagcttactgcatatctttcttctaaggaaggagtcgtatttcagtaacctttctggggtgcagagaaaggatatgtatgtagccactgtgctaaaatgtgtgtgaacagttgagatagatgctaagtgccatgccagtttgtggcactaagcatatcatttaatttttgtgttatttggcttttgtttcagatttggcaaggaaagctcaaaagataaattataagataaagtgtaggattggagccgggcggtggtggtgaacgcctttaatcccaacacttgggaggcagaggcaggtggatttccgagttcgaggccagccagggctacacagagaaaccctgtttcgaaaaaccaaaaaaaaaaaaggtaggattggaaggggccttcaattcttactacatttgacttttcaattatttgttagcatagaaatttctctatttttctttcctatgtgtctcatttataaccaaatttaatattaaaaaaactaataaacactgaatattttcactgtgtagtgaaagttttaactcatcaaatatgtacatgggaagcagtattttaagaaagttttgaggtgcataaaagctctgtaaaagtagaggtctggtttacgttgtatcttgaatcttcttaatatctagaatattcttagtcatatatcaggatggagtcatataatgcaaatttagttcatttttatgtgaggggccttgggtattgtaggtttatatatttgcagaagagatccactaaaagttgactatcagcagtagttttcattaagagagggtctcacaaaatttataggagaaatctacatctcaatatcattttggtttttgtgtctgtcaaagacaggttttcactatatactcctggccggcctggaactaactgtgtaaactaggctgccctcagactcccagagatccactggctctcagcctgttgagtgctgggattaagggcctgtgtgaccacaccagttgttgaataacttggccctttgagagctatgggatcataagaaacaatgccaagctggtagagaagccagaggtagagaacaagtagaagagaatcctgggcttagtaccgtatttgaaattcacaagaattcattgacttcctagaatataccaaacctctccaacctctaacagactgctgagtagacaggccttttctgggtcagcttccacagaagcgaagcacgccatgtttccctgattctgatggctgcacatcaatcattttcttttgaatatgctacactaatttttttccttcctaagtattggattttgcattgcaggggtattattgtgtgtatgtatttatgtatgcgtactgtactgttacaaagtgaacaaacttcaacttgaagtgcattcattatgtggtatccatgtgtatcgaccatgtgccgtatgcctattatggtcactagaacatcttttatgatgcttattattacagtgtttctcatttaacttgtaaacttttgtagaattctctttttttttccctttagatataagttcatatatttttctactttagtcctgtgaagtttatccctagtcaccttcctggtagtctcccctctgttaagggtatagttaagatttcacatatacaaggttctctgggacatcaaacaatttcttaaactgtaataaatgtgtacattaactttaatagaggactgacata

SEQ ID NO: 11 - DNA, 2283 bp, Mus musculus
gtgtttgcaaaaagggaaaagtactttgctgcctctttaagactagggctgggagaaagaagaggagagagaaagaaaggagagaagtttggagcccgaggcttaagcctttccaaaaactaatcacaacaatcgcggcggcccgaggaggagagtctccctgttttttcatcccaattgcacttcgcccgtctcgagctccgcttccccccaactattctccgccagatctccgcgcagggccgtgcacgccgaggcccccgcccgcggcccctgcatcccggcccccgagcgcggcccccacagtcccggccgggccgagggttggcggccgccggcgggccgcccgcccagcgcccgcatgtataacatgatggagacggagctgaagccgccgggcccgcagcaagcttcggggggcggcggcggaggaggcaacgccacggcggcggcgaccggcggcaaccagaagaacagcccggaccgcgtcaagaggcccatgaacgccttcatggtatggtcccgggggcagcggcgtaagatggcccaggagaaccccaagatgcacaactcggagatcagcaagcgcctgggcgcggagtggaaacttttgtccgagaccgagaagcggccgttcatcgacgaggccaagcggctgcgcgctctgcacatgaaggagcacccggattataaataccggccgcggcggaaaaccaagacgctcatgaagaaggataagtacacgcttcccggaggcttgctggcccccggcgggaacagcatggcgagcggggttggggtgggcgccggcctgggtggcgggctgaaccagcgcatggacagctacgcgcacatgaacggctggagcaacggcagctacagcatgatgcaggagcagctgggctacccgcagcacccgggcctcaacgctcacggcgcggcacagatgcaaccgatgcaccgctacgtcgtcagcgccctgcagtacaactccatgaccagctcgcagacctacatgaacggctcgcccacctacagcatgtcctactcgcagcagggcacccccggtatggcgctgggctccatgggctctgtggtcaagtccgaggccagctccagcccccccgtggttacctcttcctcccactccagggcgccctgccaggccggggacctccgggacatgatcagcatgtacctccccggcgccgaggtgccggagcccgctgcgcccagtagactgcacatggcccagcactaccagagcggcccggtgcccggcacggccaaatacggcacactgcccctgtcgcacatgtgagggctggactgcgaactggagaaggggagagattttcaaagagatacaagagaattgggaggggtgcaaaaagaggagagtaggaaaaatctgataatgcycaaaaggaaaaaaaccaccaatcccatccaaattaacgctttttcggtgatgccgactagaaaacttttatgagagatctggaggaaaaaaactacgcaaaacttttttttaaagttctagtggtacgttaggcgcttcgcagggagttcgcaaaagtctttaccagtaatatttagagctagactccgggcgatgaaaaaaaagttttaatatttgcaagcaacttttgtacagtatttatcgagataaacatggcaatcaaatgtccattgtttataagctgagaatttgccaatatttttcgaggaaagggaacaagctgggaaaagattctgcagttaaatttaggaccgttacaaacaaggaaggagtttattcggatttgaacattttagttttaaaattgtacaaaaggaaaacatgagagcaagtactggcaagaccgttttcgtggtcttgtttaaggcaaacgttctagattgtagtaaatttttaacttactgttaaaggcaaaaaaaaaatgcccatgcaggttgatatcgttggtaatttataatagcttttgttcaatcctaccctttcattttgttcacataaaaaatatggaattactgtgtttgaaatattttcttatggtttgtaatatttctgtaaattgtgatattttaaggtttttccccccttttattttccgtagttgtattttaaaagattcggctctcttattggaatcaggctggcgagaatccatgtatatatttgaactaataccatccttataacagctacattttcggcttaagtttttactccattatgcacagtttgagataaataaatttttgaaatatggacactga

SEQ ID NO: 12 - DNA, 3268 bp, Mus musculus
attccaaaggcgcctcctggagagcaaggacgcaaggaagcagagatgcccggaaccgcgctgtctccactgctcttgttgctgctcctgtcctgggcgtcccggaacgaagcagctccggaccaggatgaaatcgattgtctccccggcctggccaagcagccctctttccggcaatactccggctacctcagagcatcggactccaagcacttccactactggtttgtggagtcgcagaacgacccaaagaacagccccgtggtgctttggcttaacgggggtcccggctgcagctcgctcgatgggctgcttacagagcacggcccctttctgatccagccagatggtgtcaccctggagtacaacccctatgcttggaacctgattgccaacgtgctgtatatcgagtccccagctggggtgggcttctcctactcggatgacaagatgtacgtgaccaatgacacagaggtggcggagaacaattatgaagcccttaaagacttcttccgcctctttccggaatacaaggacaacaaacttttcctgacaggagagagctatgctggcatctacatccccaccttggctgtactggtcatgcaggatcctagcatgaatcttcaggggctggctgtgggcaatggacttgcctcctatgagcagaacgacaactccctggtctactttgcctactaccatggccttctggggaacagactttggacttcactgcagacccactgctgcgctcagaacaagtgtaacttctatgacaacaaagacccagagtgtgtaaacaatctcctggaagtgtctcgaattgtgggcaaatctggcctcaacatctacaatctctatgctccgtgtgctggtggggtgcccggcagacatagatatgaggacacacttgtagtccaggattttggcaacatcttcactcgcctgccacttaagcggagatttcctgaggcactgatgcgttctggggacaaggtacgcttggatcctccctgcaccaacaccacagccccttccaactacctcaacaacccctatgttcggaaggctctccacatccccgagtcgctgccccgctgggacatgtgcaacttcttggtgaatttacagtaccgccgcctctaccaaagcatgaactcccagtacctgaagctgctcagttcacagaaataccagatcctgctctacaacggagatgtggacatggcctgcaacttcatgggcgatgagtggtttgtggattcgctcaaccagaagatggaggtgcagcgccggccctggctagtggactacggggagagcggagaacaggtagctggtttcgtgaaggagtgttcacacatcaccttcctcaccatcaagggtgccggacacatggtccccacggacaagcctcgagctgcttttaccatgttctcgaggttcctgaacaaagagccttactgatagcttccgctgcaacccatggaaatcctcagtacctgatcagcccctctcggcctctctcagcagagaggagtcctccgctaatgctcccgtggggcaagtcctgtactaaaactgcccagacttctcacagcctggtgcatcccagcctgggcctcagggcgtcacagacagcctaggaccaagtgagcactttgttccggccatcgtggggtggcctgacctccccgactgcataaaaactgaccaccccaggaccccaacagagctagagaaacccaaggaggggggtggatggattctaattgatggttgactaattctggaattaaatcgggtatagcttccaactgggctcttctctgtggcaccgggaccactaacactgtagatgggaaggggttggcagggggtgcagagaagacttcagttaggttcctgaatgccagccacccaggtggggtgatgggctcaggcagctgcagcagagggtggggggacatgggaggccgcaacgtctgcaggacggttcttgtcaatcacttctcgaagccctttggcaaagtcgaggtcagccccaacagtgacgaagccctgcgggaggggacagggagcctggctggttcagttgtttggaaacagcctccaaacaaacacaagactcttgagcaaatcccctcaggggccccagctgctttgcggcgtggcgtatgttctctggagcatggccctgcttctaagttaaatctttactacttaaataatatatatgtgaaggagcaactagtgtaaaggggtttcgggaaaacagacaagcactggggtgttgtagggacaggaatgccctggtctacggcctcctttccacaatgtacttaccgcgtggttggtcaccacctcacgcacgaagttgataccctcaggaagggggatctgcaccccacgccaggtacgctctgtggatgagagaggcaagctcagcctgggtgtccatcagtccatctgtgtcgtcatgtccaccatccaccgccgtcccccctttgttagtccgtgtccccactccatcctcccaccctcagtccctaccgttcagcaaaggcatcactccgatttgcagcagtgtcttcagtggggcctgcagtgggatcagctgagggggaaaaaaaaggcaggggggggcgacagacagtgcatacaggtttgagtgagcggccaacttgccccgaggcctggacccaccctttgccatccccaactcaccgccagagactccagcgcagactgatttgagtagatttgaaacctgtgggagagaaatacaccgtgaaacctgggaacaccctttccttgggccctacctaaaagatggcagcaagtgacagccttcccagttctatccaatcatccttcaggtagctgccatttcccaggtgtgcatccctgagtgcctttggtctctggagccccctttctttaagcctactgcttttctttttttttttcttttgtctttttttttttttttgagacagggcttctctgtgtagccctggctgtcctggaactcactctgtagaccaggttggcctggagctctgaaatccgcctgcctcagagtgctggaattaaaggcgtgcgccaccactgcccggcgcctgctgtttttcatttgtccggaatgcctatgtgccacgctctgcggctaggtaaataagtatggttttatctaaggaaattccaacaatctttactctctgtcagataccaaacttattcaaaagaattaaaatggctctgc

SEQ ID NO: 13 - DNA, 3573 bp, Mus musculus
tggcttttgcggtgcctgggtgcctcggtcggtggtctctcgtgctttcgcttccgcagggctgcgaggggattcgttggaattgtcggtccggtggtcgcctggcctgagggatcacgatgtgcctctctccggttaaaggcgcaaagctcatcctgatctttctgttcctaggagccgttcagtccaatgcattgatagttaatttgacagattcaaagggtacttgcctttatgcagaatgggagatgaatttcacaataacatatgaaactacaaaccaaaccaataaaactataaccattgcagtacctgacaaggcgacacacgatggaagcagttgtggggatgaccggaatagtgccaaaataatgatacaatttggattcgctgtctcttgggctgtgaattttaccaaggaagcatctcattattcaattcatgacatcgtgctttcctacaacactagtgatagcacagtatttcctggtgctgtagctaaaggagttcatactgttaaaaatcctgagaatttcaaagttccattggatgtcatctttaagtgcaatagtgttttaacttacaacctgactcctgtcgttcagaaatattggggtattcacctgcaagcttttgtccaaaatggtacagtgagtaaaaatgaacaagtgtgtgaagaagaccaaactcccaccactgtggcacccatcattcacaccactgccccgtcgactacaactacactcactccaacttcaacacccactccaactccaactccaactccaaccgttggaaactacagcattagaaatggcaatactacctgtctgctggctaccatggggctgcagctgaacatcactgaggagaaggtgcctttcatttttaacatcaaccctgccacaaccaacttcaccggcagctgtcaacctcaaagtgctcaacttaggctgaacaacagccaaattaagtatcttgactttatctttgctgtgaaaaatgaaaaacggttctatctgaaggaagtgaatgtctacatgtatttggctaatggctcagctttcaacatttccaacaagaaccttagcttctgggatgcccctctgggaagttcttatatgtgcaacaaagagcaggtgctttctgtgtctagagcgtttcagatcaacacctttaacctaaaggtgcaaccttttaatgtgacaaaaggacagtattctacagcccaggagtgttcgctggatgatgacaccattctaataccaattatagttggtgctggtctttcaggcttgattatcgttatagtgattgcttacctaattggcagaagaaagacctatgctggatatcagactctgtaacactaatccacatgtgatctgttacaaaacaataaagcaagtacaagttctcgcatgcaatactattgaagggtacattagttacagtcctgctcttagattgggtggtatagtagagctcaaattaaaacaaaagaattccaaatactatcaactacaaatgaatcatatgattttggttttcctgactaaggagtttaaaattactatggcaaaaggcatgtacaaaattatctggttctgtttcactggtctggaatttctgaatgagaacgtccagtgtaggaaaaagccggtttcttctgcctgcatgaaattgagtttggccatcctgatttccagtggatttgtacttgctccttttgcattgcttgtgacttttgtttgcaggttgacttagctacttcggccttgttccatatttgacctatgaaaaaggtatcagtagatttgaacagagcccagaggtaccatgctcttgccagtaaaattcttttcccatgtttttgaatacatttgtatttaatgtggctgaaatgacaaaaacaaaggtcctaaattttagaatagatgttatctttttatttaatctttaaaaaaaaaaactggatgtttcaatcttttaaattgcaagacacaaggcaattccaactgggcatttcaatctggttttaggtgctttagagataattgctaggcagtgccaaatgaaggcattagtgctttgtacccagaaattggcctctacatgcagcactaagattaatgcagatttctcttgaaccttccagtcttccttgttggtggtaatgtgctttgttctttcctttttttcctcaagaagaaatgttagtatgtcttagaacctaggtaacgaagtgcacttatgctcataaaattgcttgcacctaatccaaaagtcatggtcttgccttagtccattaacatggtcttcatttccaggtttgcattgactgctacagcacttactaatttggcttttatgtttaaatggttctgtgataatcaaaacttaaatagttactgttcgttcattgtggtacttttgtattcagttctgtactcagagatggcaccaattgttcatttactatgcaccacctactgcttatataagagaactaataactctttcagcccgatacttaacacatcatgtattccttgcagcttctaggacatcttccatacatgtatggatgtgtacatacatatacatgtgtacatactggtatggcccagcacatatttcttaagctctgcagccatatatagaaggtccttgcttatttggggaggacagattaaatgcctttcattcacaagaaaatgaagagctctctgggttccaaaatgctgatgttgaatacatgatatatatgcacacatataggcacttgcatgttagcatgttcatgtctgtgactgtcttttgagttatataggagtggcagagattgtgtcactttaacttgttgtcgacttagcctgaaaaccttactagttcagaatcatactcctgactgtcttctggagcaacagggaactgcatggccaacttaaagtacttgttataaatgaaccagaaatctgattttaaaatacatttttcattttaattgtttttgcattttgttttgttaatccttaaaggatggattgtgcttttaagaatgtaagtgttatgtatttgtcatgaatcaacaaaacagcttttaaaaaagactaattggaacaagtgggtggcactggcttaatgctgttaatgtttctaaacgattttacatttagattatatatcggattcatattgagatacctccaaagcactgttttatagaaagatctgacttcaataaatatttttgtattttacatgggccagtttatgtaccgctatttacactattatttcctatagacaatacacactgtctttgtagtttttgtatttttgttttgttttactggttttgcttcttgatggtaatatactctgtctggtgtgggatattttccacactttagaatttgtataagaaactggtccatgtaagtactttccatgttttctcttcaaatgtttaaagtgctagctgatgtacgtacgatatctcttctcagatatttgcctgtctgtttgcccaaaattgcttctaaatcaataaagattcttttatttctg

SEQ ID NO: 14 - DNA, 1897 bp, Mus musculus
ggagcatttatttggcgcagcgctcccagcgcccgcagctggctggagccggtggtgacatcacgagcccgggcaggccacgtgacccacggcttctcctcccccctgcctcctagcgtcgccgcggtcttcgagcccagtgtcccgtcgcagcggccactcggagctctcggtacagtgcagagccaagggtcgggcgagcggtccgagggtcggggcggccaaggagaggggcaggagcagcggacccaagacgaagcgagcgacgctctcacaaacttccacgagcgccggagctatgaagatggtcgctccctggactcggttctactcccacagctgctgtttgtgctgccatgtccgcaccggcaccatcctgctgggcgtctggtacctgatcatcaatgctgtggtcctgctgatcctgctgagtgccctggcagatcccaatcagtatcacttttcaggctctgaactaggaggggagtttgagttcatggatgatgccaacatgtgcattgctatcgcaatctctctcctcatgatcctgatatgtgccatggctacttacggtgcatacaagcaacatgctgcctggatcatcccgttcttctgttaccagatctttgattttgccctgaatactttggttgcaatcactgtgcttgtctatccgaactccattcaggaatacatacgacagctgcctcctagctttccctacagagatgatataatgtccgtgaatcctacctgtttggtccttattattcttctgtttatcggcattcttttgacacttaagggctacttgattagctgcgtttggagctgctacaggtacatcaacggcaggaactcctccgatgtcctggtgtatgttaccagcaatgataccacagtgctgctgcctccgtacgatgatgctactgctgtgcctagcactgccaaggaaccaccaccaccttacgtgtccgcctgaacctggtgcggaagagctgagagcagcagtttgagcccttagctgcatgaattatcctgtggtttcacttccatgatgaactctctgagccacattttacaatttagatgttaagctgaagcctctgttgacacatgccctgtagctaagcactgactagcgaggctgtaggagtggagtgtggtgagttcccagagtctttctcaaaactacagacgttggtccccgggctggcttatacctgcctggccccagagctgggtgggcagtcatacttttcttctccattccctctgattgttttgaaagtataaaattaaaattagatgatacttaaatctttccagtatacgtaatacaaatagtattaattgctctaattagatagttaggagcccttccatatgtgatataagaattcccctactatccctgaattcaatgatactctgaatttgctggtcaaggattttctttgggccaaataaagacccccaaggtaataggcaacagtgagggcaacagctgccgggctgcctgttgttttgggctatggttgatgtgtctccctgtgtgaaaggggggccagcttgctctgcactgagagactcacactcccttttccttggttacctgcaccaacagagccaccatgtatgtttgggaaaaggtgttcacactcttttcttgcaaggtacaacctgctttgaatttctaagtatgcctaatcattcattaaaatgtcaagcagtcttcagaaagataaggaggtttgttcccatgtagaatactctagactgtctggattgtgaaagacgtttatgttcatgtctctgaatgtgagcaggtctcctgcttggtccttgctcaatgtgctgtacacaaaggctttgcaattaaagtttgtctgcattc

SEQ ID NO: 15 - DNA, 1389 bp, Mus musculus
gcccagccgggctgctccgcttcaagggaggctctcagcgatacgtgcccggcccagctttttttttcttcaaaatgtctactgtccacgaaatcctgtgcaagctcagcctggagggtgatcattctacacccccaagtgcctacgggtcagtcaaaccctacaccaacttcgatgctgagagggatgctctgaacattgagacagcagtcaagaccaaaggagtggatgaggtcaccattgtcaacatcctgacaaaccgcagcaatgtgcagaggcaggacattgccttcgcctatcagagaaggaccaaaaaggagctcccgtcagcgctgaagtcagccttatctggccacctggagacggtgattttgggcctattgaagacacctgcccagtatgatgcttcggaactaaaagcttccatgaagggcctggggactgacgaggactccctcattgagatcatctgctcccgaaccaaccaggagctgcaagagatcaacagagtgtacaaggaaatgtacaagactgatctggagaaggacatcatctctgacacatctggagacttccgaaagctgatggtcgcccttgcaaagggcagacgagcagaggatggctcagttattgactacgagctgattgaccaggatgcccgggagctctatgatgccggggtgaagaggaaaggaaccgacgtccccaagtggatcagcatcatgactgagcgcagtgtgtgccacctccagaaagtgttcgaaaggtacaagagctacagcccttatgacatgctggagagcatcaagaaagaggtcaaaggggacctggagaacgccttcctgaacctggtccagtgcatccagaacaagcccctgtacttcgctgaccggctgtacgactccatgaagggcaaggggactcgagacaaggtcctgattagaatcatggtctctcgcagtgaagtggacatgctgaaaatcagatctgaattcaagaggaaatatggcaagtccctgtactactacatccagcaagacaccaagggtgactaccagaaggcactgctgtacctgtgtggtggggatgactgaagggctcagcacagtggatcacccagaagtggctctacctgtgccccaacctggcgttctagagacttcgctctccactaatggacccctgagctcctccctgtgaggatgatgacagggctgccgaccctttccccatcttagctgcccttgcctggctttctcctcattctctcctttatgccaaagaagtgaacattccagggagtggggcgtagcgtctgtgacatgagacacttcctcttatgtactgtgtcgtgaataaaccgtttttactttaaaaaaaaaaaaaaaa

SEQ ID NO: 16 - DNA, 3674 bp, Mus musculus
ggcctcagacctggatccccaaaggcgtgtgcctagggagactgaaactcaggagaacctggagagatgctgtcccctcctccatagaccagagggatccagagcgatggggacagggaccctctcatctctactgctgctgctactcttggtgacaattggagatgctgacatgaagggacattttgaccctgccaagtgccgctatgccctgggcatgcaggaccgcaccattcctgacagcgatatctctgtgtccagctcctggtcggactctaccgctgcccgccacagcaggctggaaagcagtgatggagatggggcttggtgccctgcagggcctgtgttccccaaagaagaggagtacttgcaggtggaccttcgtaggctacacctggtggctctggtgggcacccagggacgccatgctgggggtctgggcaaagagttctcccgaagctatcggttgcgttactcccgagatggccgccgctggatggactggaaggaccgctggggacaggaggtgatttcgggtaacgaggatcccgggggagtagtgctgaaggaccttgggccccccatggtggcccggctggtccgcttctaccccagggctgaccgggtcatgagtgtctgtcttcgggtggagctctatggctgcctctggcgggatggactcctgtcatatacagcccccgtggggcagaccatgcagttatctgaggtgatggtacatctcaatgattccacttacgatggatatactgctggagggctgcagtatggcggtctgggccagctggcagatggcgtggtgggcctggatgatttcaggcagagccaggagctgcgggtctggccaggctatgactatgtgggatggagcaatcagagcttccccacgggctacgtggagatggagtttgagtttgatcggttgaggaccttccagaccatgcaggtccactgtaacaacatgcacactctgggagcccgcctaccaggtggggtggaatgccggtttaaaaggggtcccgccatggcctgggaaggagagcctgtccgccatgctctgggaggcagccttggagaccccagagcccgggccatctcagtgcccctgggtggccacgtgggccgctttctgcagtgcagattcctctttgcaggtccttggttactcttcagtgagatctctttcatctcagatgtggtgaacgactcctctgacaccttcccaccagccccctggtggccacctggcccgcctcccaccaacttcagcagcttggagctggagccccggggtcaacagccagtggccaaggcggaggggagcccaactgccatcctcattggctgcctggtggccatcatcctgctgctgcttctcatcatcgcgctgatgctctggaggctgcactggcgccggctgctcagcaaggctgagcgccgcgtgttggaggaggagctgacggttcacctttctgtccctggggacaccatcctcatcaacaaccgcccaggaccccgagagccacccccttaccaggagccccggcctcgggggactccaccccattctgcaccctgcgtccccaacggctctgcgttgctgctctccaatccggcctaccgcctccttctggccacttacgcccgtccccctcgaggcccgggcccccccacacccgcctgggccaaacccaccaacacccaggcctgcagtggggactatatggagcccgagaagccgggtgccccgcttctacccccacctccccagaacagcgtcccccattatgccgaagctgacattgtcaccctgcagggcgtcactgggggcaacacctacgctgtgcctgcactgcccccaggggcggttggggatgggccccccagagtggatttccctcggtcacgactccgcttcaaggagaagcttggcgagggccaatttggggaggtacacctgtgtgaagtagaggacccgcaagatctggtcagtagtgacttccctatcagtgtgcacaagggacaccccttgctggtagcagtgaagatcctccggccagatgccaccaaaaatgccaggaatgatttcctgaaggaggtaaagatcatgtcacggctgaaggacccaaacatcatccggctcctgggtgtgtgtgtgcaggatgaccccctctgcatgatcacagactacatggagaacggcgatctgaaccagttcctcagtgcccgccagctggagaacaaggccactcaggggctctctggggacacagagtctgaccaggggcccacaatcagctaccctatgctgttacacgtgggggcccagatcgcctctggcatgcgttatctcgccacgctgaactttgtgcatcgggacctggccacccggaactgcttggttggggaaaatttcaccatcaaaatcgccgactttggcatgagccggaatctctacgctggggattattaccgtgtccagggccgggcggtgctgcccatcaggtggatggcttgggagtgcattctcatggggaagttcacaacagccagtgacgtttgggccttcggagtgaccctgtgggaggtgctgatgctctgcaggtcccagccctttgggcagcttacagatgagcaggttatcgagaatgccggcgagttcttcagggaccagggccggcaggtctacttgtccaggccacccgcctgcccacagaccctgtatgagctgatgctccggtgttggagccgggagcccgagcagcggccgcccttcgcccagcttcatcggttcctggcggatgatgcgctcaacacggtgtaaactcaggacccggcagccctttcccaatggaaggccatccaggggaagctggactcgaaaaccgagagacctatgcgaccgcaccccaccgtctccatacttgcccattccccaagaggtcagtgtctctgcagggttatggctgggactgggactgccaaggaatcagattacacacactccttacgtttcttccttccatctgccaagtgccaccctcccagctggccctgtggttgggatcctgcctgacttcttccagctatccccttgggaagaacgggggcaaatgctgggcgtacactggacaaggcccactggacttcactggttcctgggaggtgacggtgccccccagctttcttcttgtcacacactggacgccgccagctgagaattagaggggtgagggggacagaggacggccaacccctacagcggtcctcagccctggcttccttctgttccgccccctgacacactgacctgggcgatccctgccgtgatcctcagtcacacacccctccttctcacctgccatgctgcagctagaacttcgcaaagcctctatgtttctgtggagtaaatattaggatggggaacagagggagcaatagcttgaggctgggggtggggatttctattgtagctaccacattggtttttctataatcacgcggggtttgtacattttttggggggagagaaacacagatttttacactaatatatggacctagcttaaggcgattttaatcccctgtcctaggcaggtaataataaaagttgagttgagttgttttttgttttttgtttttccacaaaaaaaaaa

SEQ ID NO: 17 - DNA, 1900 bp, Mus musculus
gcgcaggcaagcggctgcagattgcgggctctcccatctcatttctccggtcccggccctccgaccgcgacccgccgccatgcgcttcagctgcctagctctgctcccgggcgtggcgctgctgctcgcctcggcccgtctcgccgccgcctccgatgtgttggaactgacggacgaaaacttcgagagtcgcgtctccgacacgggctcggcggggctcatgctggtcgagttcttcgccccctggtgtggacattgcaagaggcttgcccctgagtatgaagctgcagcaaccagattaaaaatagtcccattagcaaaggtggattgcactgccaacacaaacacctgtaataagtatggggtcagtggctacccaactcttaagatctttagagctggtgaagaagcgggtgcttatgatgggcctaggactgctgatggaattgtcagccacttgaagaaacaagcaggaccagcttcagttcctctcaggactgaggaagaatttaagaagttcattagtgataaagatgcctcagtggtgggttttttcagggatttattcagtgatgggcactctgaattcctaaaagcagccagcaacttgagagataactaccgatttgcacacaccaacattgagtctctggtgaaggagtacgatgataatggagaggggatcactatattccgtccattacatcttgctaacaagtttgaagacaaaactgtggcatatactgaaaagaaaatgaccagtgccaagatcaagaaatttattcaggatagcatttttggtctctgtcctcatatgacggaagataataaagatttgatacaaggcaaggacttactcaccgcttactatgatgtggactatgaaaagaatgctaaaggttctaactactggagaaacagggtcatgatggtggcaaagaaattccttgatgctggacacaaactcaactttgctgtagctagccgtaaaacctttagccatgaactgtcagattttagcttagaaagcactactggagaggttcctgttgtggctatcagaactgctaaaggagagaagtttgtcatgcaggaggagttctcgcgagatggcaaggctcttgaacagttcctgcaggaatactttgatggcaacttgaagagatacctgaagtctgaacccatcccagagtccaacgaagggcctgtcaaggttgtggtagcagagaattttgatgacatagtgaatgaagaagataaggacgtgctgattgaattttacgccccttggtgtggccactgtaagaatctggaacccaagtataaagagctgggagaaaaactcagcaaagatccaaatattgtcatagccaagatggatgccacagccaatgatgtgccttctccatatgaagtcaagggttttcctaccatctacttctcaccagccaacaagaagctaactccaaagaagtatgaaggtggccgtgaattaaatgattttattagctatctacaacgagaagctacaaacccccctataattcaagaagaaaaacctaagaagaagaagaaggcacaagaggacctctaaagcaacagccaaatgcaccactttataaaaggactcttacaccagagaaggcaaaaccagagaggacagaatggataaactctgaatcctgttaaattttctctaaactgtttcttagctgcactgtttgaaaatacaaggaccagtttatgtttgtggttggggagaaaattatttgtgttggaagaatgttgtgggggtggggggagttgagttggggggttattttctaattttttttgtacatttggaacagtgacaataaatgtgccccctttaaaaaaaaaaaaaaaaaaaaaaaaaaaa

SEQ ID NO: 18 - DNA, 1770 bp, Mus musculus
gtcgacggccattaccaatcgcgaccggcaagggagggggagcttaattccccccactatagggggaggtggacgctttttctatgtaaacagaaattggcacattcctcctccttctcccctttcctccactcttcccccacatctttatggaagcagaaaggacctgcattttcctacactgaggagctatggtgaagatgaggtatgggagagatggttgtatctaaagaaaaccagtggggaaggaaggtaaagaggccactcaacctccacctggtaagggacaaagaaaagccaggactcagtgtttgtatctctatgctggactggttagaagccagcttcccgctgttcccttaggctgaggtcctgagtgccaatgggccctccttatgcccttgttatgggcctgggatgcggatgagccagaaatcttaatgagaagaccactcgatcctttcctggtcccaaagatcaaaccccaatggagaagccagcatttactgtcccccaaccttctgctctggagagacgatgccgggaccatgcactactgagcctgagctagggacgcaggcagagacaggcccactttctgctcctcagtttctaaatacagactgttggataaactgacctggagcctagggagattgggggatgagatccttaggttttaaccccaacctgcccacaacctacagagtattgtaggcaacctttccactctccagtttagaattctccaagcaagtagttaattacagtgtttcctttgcactgaccaccaccctgattcaatccaggaagggactggtaacctttctcatttgggtttgtggatgccacacagccaagtcactagagtgcagtgagtgaacccagcctcctccctgtcccaagatgcccttccccatcttgaccgtgctaactgtgtgtacatatatattctacatatatgtatattaaacccgcactgccatgtctgcccttttttgtggtttttagcattaacttattgtctaggccagagcgggagtgggaggggatgccacagaaaggaagtggcagagccaaattgttacagagtccaaacagaaaacacatttcaactaaccacaacaaatgttacatttacatgtgagctaagagacaatttagagaaagatgaaggtaggtgcttttaggatgtgggagcaaaacttcacagggaggggaggaatggctgtcagaagagggttcttgaagccagactgactagagcaccctcagttcctagctgagcccagattgcccatctcctctggccactgctgcagacacctgccttaactctcacacctcgaagactccagttttgccttaaaggtccttcctaaatctccctagtcttgcctggcatctcctttaagacaagaaatccttgtacaactgggtgggagaaaggaactctgggtaacatccttccttctggggtgttccatgggagcaggagtgagacggcgcttcccttatggaagagggaggagacagggtgcttctcagaagcttctctgtaaggcaaaaaccaaactttaaacagactaacctgccctaatatactcaccccctcgtgctgctgtgaggttgctcctagcctgtgctcctctgtctgcagcgtgcacagccttgttctaaccctggaataaaggtgactgactctaccgtaaaaaaaaaaaaaaaaaaaaaaaaaaaaaaaaaaaaaaaaggccgcctaggcccgtcgac

SEQ ID NO: 19 - DNA, 1876 bp, Mus musculus
gtgatgtccagtacacggatgaggcactccacgtgacgctagcgccgagtgaacatggcgtccactgtgcgcccttccttctccctggggaatgagaccctgaaggtgccactggccatattcgccctgaacaggcagcgcctgtgtgagaggctgaggaagaatggagctgtacaggccgcctcagctgtcgtgttgcagggcggggaagagatgcaacggtactgcaccgatacctccatcatcttccgccaggagtccttctttcactgggccttcggtgtcgtcgagtcaggctgctatggtgtcatcgatgtggacactggaaaatcaaccctgtttgtgcccaggcttcctgatagctacgccacctggatgggaaagatccattccaaggagtatttcaaggagaagtacgctgtggatgatgtccagtacacggatgagattgccagtgtcctgacctcacggaacccctctgtcctcctcactttgcgcggtgtcaacacagacagtggcagtgtctgcagggaggcctccttcgagggcattagcaagttcaatgtcaacaacacgattcttcacccagagatcgtggaatgccgagtgttcaagacagacatggaactagaggttttgcgctacacaaatcggatctccagcgaggcccaccgtgaggtaatgaaggctgtaaaagtggggatgaaggaatacgagatggaaagcctgttccagcattattgttactctaggggcggcatgcgccacacctcttacacctgtatctgctgtagcggtgagaacgcggccgtgctgcactatggccatgctggagcccccaatgaccggacgatcaaggatggagatatttgcctgttcgacatgggtggcgagtactactgctttgcttctgacatcacctgctccttcccagccaaccggaagttcacagaggaccagaaggccatctacgaagcagtgctcaggagctgcagaactgtcatgagcactatgaagccaggggtctggtggcctgatatgcatcggctggctgaccgtatccacctggaggaactggcacgcattggcctcctgagtggcagtgtggatgccatgctccaggtccacctgggagcagtattcatgccacatggacttggccactttctgggcctagatgtgcacgacgtgggaggctaccctgagggtgtagagcgcatcgatgaacctggcctgcgaagcctgcgtacggcaaggcacctggagccgggcatggtgctgactgtggagccaggcatctacttcattgaccacctcttggaccaggccctggcagacccggcccaagcctgcttctttaaccaagaggtcctgcagcgcttccgcaacttcggtggggtgcggatcgaggaagatgttgtcgtgactgacagcggcatggagctgctgacatgtgtaccccggactgtggaggaaatcgaagcgtgcatggcaggctgcgacaaggcatctgtgcccttctctggccaaaagtagagccagctgagacactcagtgagactgggccctggccttgtaagctctgtgatgtcagcctgcccatggcaccccaaaagcaagatcctggagatcacatttgatcctaccaaaaccactgctgctgtttctgagaaaagaaagcattttattcacctgcaagatcacatccctagctttgattttgcttaaatgatagggacttaagagtgctgattgaagaaagatcctattcttaggtctaactcgatttttgtgctcagggaagatgcactgatgtcttcaaaaaaaaatcaacatgcagaatggaatttgcaataaaggcttttctaaaactgac

SEQ ID NO: 20 - DNA, 3070 bp, Mus musculus
ccgcccagcgccgggctcggtcagcatggattcctggttcattcttgtcctgtttggcagtggtctaatacatgttagtgccaacaatgctactacagtttcaccttctttaggaacgacaagattaattaaaacatcaacaacagaattggctaaggaagagaataaaacctcaaattcaacctcttcagtaatttctctttctgtggcaccaacattcagcccaaacctgactctggagcccacctatgtgactactgttaattcttcacactctgacaatgggaccaggagggcagccagcacggaatctggaggcactaccatttccccgaacggaagctggcttattgagaaccagttcacggatgccataacagaaccctgggaggggaactccagcactgcagcaaccactccagaaaccttccccccggcagatgagacaccaattattgcggtgatggtggccctgtcctctctgctagtaatcgtgtttattatcatagttctgtacatgttaaggtttaagaaatacaagcaagctgggagtcattccaactctttccgcctgtcaaatggccgcacggaggatgtggagccccaaagtgtaccacttctggccaggtccccaagcaccaacaggaagtacccaccactgcctgtggacaagctggaagaggagattaaccggagaatggctgatgacaataagatcttcagagaagaattcaacgctctccctgcttgtcctatccaggccacctgtgaggctgcctccaaggaagaaaacaaggaaaaaaaccgctatgtaaacatcctgccctttctctctttagctgtgagcaaggatgcagtgaaagcactgaacaaaaccactccattgttagaaagaaggtttattgggaaatcaaactccagaggctgtctctcagatgaccactctagagtgcacctgacacctgttgaaggggtcccagattctgattacatcaacgcttcattcattaatggctaccaggaaaagaacaaattcatcgctgcacaaggaccaaaagaagaaacagtgaatgacttctggagaatgatatgggaacaaaacacagctactattgtcatggtgaccaacctgaaggagagaaaggagtgtaaatgtgcccaatactggccagaccaaggctgctggacctatgggaatgtccgtgtgtctgtcgaggatgtgactgttctggtggactacacagtacggaaattctgcatccagcaggtgggcgacgtgaccaacaggaaaccacagcgcctcatcactcagttccacttcaccagctggccagactttggggtgcctttcaccccaattggcatgctcaagttcctcaagaaggtgaaggcctgtaaccctcagtacgcaggggctatcgtggtccactgcagtgcaggtgtagggcgcactggcacctttgttgtcatcgatgccatgctggacatgatgcattcggaacgcaaagtggatgtatacgggtttgtgagccggatccgggcccagcgctgccagatggtacagacagacatgcagtacgtcttcatataccaggcccttctggagcattatctgtatggggacacagaactggaagtgacttctctagaaacccacctacaaaaaatttataacaagatcccagggacgagcaacaacgggttagaggaggagtttaagaaattaacttcaatcaaaatccagaatgacaagatgcgcacgggaaaccttccagccaacatgaagaagaaccgggttttacagatcattccatatgaatttaacagagtgatcattccagtcaaacgaggcgaagagaacacagactatgtgaacgcatccttcattgatggataccggcagaaagactcctacattgccagccagggccctcttctccacacgattgaggacttctggcgaatgatctgggagtggaagtcctgttctatcgtaatgctgacagaactggaagagagaggccaggagaagtgtgcccagtactggccatctgatggcctggtgtcctatggagacatcacagttgagctgaagaaggaggaggaatgtgaaagctacactgtccgagacctcctggtcaccaacaccagggagaacaagagtcggcaaatccggcagttccacttccacggctggcctgaggtgggcatccccagcgacggcaagggcatgatcaacatcattgcagcagtgcagaagcagcagcagcagtcggggaaccatcccatcactgtgcactgcagtgccggggcaggacggacaggaaccttctgtgccttgagcacagtcctggaacgtgtgaaagcagaaggaattttagatgtcttccaaactgtcaagagcctgcggctgcagaggccacacatggtccagacactggaacagtatgaattctgctacaaggtggtacaggagtacattgacgccttttcagattatgccaacttcaagtgacaggtgacaaggcccacagacaggagaattgcctttaatattttgtaatattctgtttttgttaatatacccaaaattgtatatatcttataactgttttagaaatggcacataggcttctattacctgttaggtggagattttgtatgtaaatgtgttagcactgatagtccttttccagtgttttattgggaaattaaatagtgtgatatttgggttgatataatgaaatcctcagcctggaaactgggccagattgttccttgcttcaaatatcttttcctaaagaagataaacctaagactcattccaggtagctcagtgccaactaaaacaaagcacaaagttctcagagctcttgaggaaatggttgtctccctgtccccaggcaggcctcttcccctccctgtcctgtaaatatccctcccctctccagtccaccctcatctcccaccaagatcagccacctcaggcatggggagtaatgagaccagagcgcctctctggcaccacagcagggatcgtcaggtaataaacactcttgattccctgagg

SEQ ID NO: 21 - DNA, 3790 bp, Mus musculus
aggagcgcccagttgctgccggagctgggcccgccagaacctctcctggagccccttgctctccttgaatctccctttcccaccgctttctggatacccttgacgcccacgttcctcgcgccctttccgcccctacgcggcggctgcccctgccacccaagtccctgctcaagcccgcccggtcccgcgcgtgcccagagccatggctccagtgcgcaccgcatccctgctctgcggcctcctggcactgctgacgctgtgccctgaggggaacccacagacggtgctgacggacgacgagatcgaggagttcctcgaaggcttcctttcggagttggagacccagtccccgccccgggaagacgacgtggaagtccagccgcttcccgaacccacccagcgtccccgcaaatccaaggcagggggcaagcagcgggcagatgtagaagtccctccagaaaaaaacaaagacaaagagaagaaaggaaagaaggacaaaggccccaaagccacaaaacccctggagggctctaccaggcccaccaagaaaccaaaggagaagccacccaaggccaccaagaagcccaaggagaaaccacccaaggccaccaagaagcccaaggagaagccacccaaggccaccaagaagcctaaggagaagccacccaaggccactaagaggccctcggcaggaaagaagttctcaactgtggcccccttggaaacgctggatcggttactcccctcaccctccaaccccagcgcccaggagctaccgcagaagagagacacacccttcccaaatgcctggcaaggtcaaggagaagagacccaggtggaggccaagcagccccggccagagccagaggaggagactgagatgcccacactggactacaatgaccagatagagaaggaggattacgaggattttgagtacatccgtcgccagaagcagcccaggccaacacccagcaggaggaggctctggccagagcgccctgaggagaagactgaagagccagaggaaaggaaggaagtcgagccacctctgaagcccctgctgcctccggactatggggatagctacgtgatccccaactatgatgacttggactattatttcccccaccctccaccgcagaagcctgatgttggacaagaggtggatgaggaaaaggaagagatgaagaagcccaaaaaggagggtagtagccccaaggaggacacagaggacaagtggaccgtggagaaaaacaaggaccacaaagggccccggaagggtgaggagctggaggaggagtgggcgccagtggagaaaatcaagtgcccacctattgggatggagtcacaccgcattgaggacaaccagatccgtgcctcctccatgctgcgccacggcctcggagcccagcggggccggctcaacatgcaggctggtgccaatgaagatgactactatgacggggcatggtgtgctgaggacgagtcgcagacccagtggatcgaggtggacacccgaaggacaactcggttcacgggcgtcatcactcagggccgtgactccagcatccatgacgacttcgtgactaccttctttgtgggcttcagcaatgacagccagacctgggtgatgtacaccaatggctacgaggaaatgaccttctatggaaatgtggacaaggacacacctgtgctgagcgagctccctgagccagttgtggcccgtttcatccgcatctatccactcacctggaacggtagcctgtgcatgcgcctggaggtgctaggctgccccgtgacccctgtctacagctactacgcacagaatgaggtggtaactactgacagcctggacttccggcaccacagctacaaggacatgcgccagctgatgaaggctgtcaatgaggagtgccccacaatcactcgcacatacagcctgggcaagagttcacgagggctcaagatctacgcaatggaaatctcagacaaccctggggatcatgaactgggggagcccgagttccgctacacagccgggatccacggcaatgaggtgctaggccgagagctcctgctcctgctcatgcaatacctatgccaggagtaccgcgatgggaacccgagagtgcgcaacctggtgcaggacacacgcatccacctggtgccctcgctgaaccctgatggctatgaggtggcagcgcagatgggctcagagtttgggaactgggcactggggctgtggactgaggagggctttgacatcttcgaggacttcccagatctcaactctgtgctctgggcagctgaggagaagaaatgggtcccctacagggtcccaaacaataacttgccaatccctgaacgttacctgtccccagatgccacggtctccacagaagtccgggccattatttcctggatggagaagaacccctttgtgctgggtgcaaatctgaacggtggtgagcggcttgtgtcttatccctatgacatggcccggacacctagccaggagcagctgttggccgaggcactggcagctgcccgcggagaagatgatgacggggtgtctgaggcccaggagactccagatcacgctattttccgctggctggccatctcatttgcctccgcccatctcaccatgacggagccctaccggggagggtgccaggcccaggactacaccagcggcatgggcattgtcaacggggccaagtggaatcctcgctctgggactttcaatgactttagctacctgcacacaaactgtctggagctctccgtatacctgggctgtgacaagttcccccacgagagtgagctaccccgagaatgggagaacaacaaagaagcgctgctcaccttcatggagcaggtgcaccgtggcattaagggtgtggtgacagatgagcaaggcatccccattgccaatgccaccatctctgtgagtggcatcaaccatggtgtgaagacagcaagtggaggtgactactggcgcattctgaacccgggtgagtaccgtgtgacagctcacgcagagggctacacctcaagtgccaagatctgcaatgtggactacgatattggggccactcagtgcaacttcatcctggctcgatccaactggaagcgcattcgggagatcttggctatgaacgggaaccgtcccattctcggagttgacccctcacgacccatgaccccccagcagcggcgcatgcagcagcgccgtctacagtaccggctccgcatgagggaacagatgcgactgcgtcgcctcaattctaccgcaggccctgccacaagccccactcctgcccttatgcctcccccttcccctacaccagccattaccttgaggccctgggaagttctacccactaccactgcaggctgggaggagtcagagactgagacctatacagaagtagtgacagagtttgagacagagtatgggactgacctagaggtggaagagatagaggaggaggaggaggaggaggaggaagagatggacacaggccttacatttccactcacaacagtggagacctacacagtgaactttggggacttctgagactgggatctcaaagccctgcccaattcaaactaaggcagcacctcccaagcctgtgccagcagacacatagccatcagatgtccctgggtggaccccactcccccagtgtgggacatcaaagctaccgggactctgcatagactctggtctacccgccccagctctacctgccagcctttggggaggggcaggcaagga

SEQ ID NO: 22 - DNA, 1401 bp, Mus musculus
accgcggaccgcaggatccgactcagctgcgatcatgttcttggtgaattcgttcttgaagggcggcggtggcggtgggggaggcgggggtctgggcgggggcctggggaatgtgctcggaggcctgatcagcggagctgctggcggcggcggcggcggtggcggtggaggcatgggactgggaggaggtggcggaggcggtggaactgccatgcgcatcctgggcggagtcattagtgccatcagcgaggctgctgcgcagtacaacccggagcctccgcccccacgtagtcattactctaatattgaggccaacgagagtgaggaggtccgtcagttcaggaaactttttgtccagctggctggagacgacatggaggtcagcgccaccgaactcatgaatatcctcaacaaggtcgtgacccgacacccggatctgaaaactgatggttttggcattgacacttgtcggagcatggtggctgtcatggatagcgacaccacaggcaagctgggctttgaggagttcaaatacctctggaacaacattaaaaagtggcaggctatatacaaacgctttgatactgaccgatcagggactatcggtagccatgaactcccaggcgcctttgaggccgcaggattccacctgaatgagcatctctacagcatgatcatccggcgctacgcagatgagagcggaaacatggatttcgataacttcatcagctgcttggtcaggctagatgccatgttccgtgctttcaaatctcttgacaaaaatggcaccggacagatccaagtgaacatccaggagtggctgcagctgactatgtattcctgaatgggagtggcagactgcccctcacagctcactatggagccaccttgaaccctgatcctgactgcagccgcattttcatggtcatgtcctgctacccagaggcctttcgtctccctgttctggtacccagcttcccaatcagcagccagagctcaacatgccacaccttgctgcaccctgagttacccctggctctgagacaagctagcttgttctactgaagggtcaccccaccctagcacacccaatccacgccatctgttaccttcatcctgtctgtgtgccaagcctaacactcctgctgcttccatgtcccaagggccctgtcttagttctgggaggatcacacctgtccctacacaccctgttacacactcacacagttacctcccaggcagccagatgaactccaggccatggcaggtccacacaccctaatgcctacgcctgctctgtgctccccctgcacagcggtcgggcccaggagaaaataaactctctctacttgctgcttccttcggactctgagtgctgagtccaggcaggagggaacatga

SEQ ID NO: 23 - DNA, 1602 bp, Mus musculus
aattcggcacgcgggggcagtccgtgagtagaaacaggaggaggggctgaggaagggtgcggtctgggttgccacccaggctagccgggagctacggccggccgaggctgatctttcaccttcgctgagcttctgcctgggcttcgctccgcggccccaaggattgctgtgatctcggcttgagagaaaggtggactgtcatggcctctatctgggttggacctcgaggaaccataaaagattatccaggctttagcccgtcggtggatgccgaagctatccggaaagcgatcagaggacttgggactgacgagaaaaccctcatcaacattctgacggagcggtcgaacgcgcagcgacagctgattgtcaagcagtaccaagcagcgtatgaacaggagctgaaagatgacttgaagggtgatctctctggccacttcgagcacgtcatggtggctcttgttactgcaccagccctgtttgatgcgaacgaactgaagaaatccatgaagggaactggcacagatgaagatgccctgattgaaatcctaacaaccaggtcaagcaggcagatgaaggaaatctcgcaggcctattatacagtgtataagaagagcctcggggatgacattagctctgagacgtctggagacttccggaaagctctgctgactctggcagatggtagaagagatgaaagcctcaaagtggatgaacatctggccaaaaaggatgctcagatcctctataatgctggtgagaacaaatggggcacagacgaagacaaattcaccgaggtcttgtgtctacggagcttcccgcagctgaaactaacatttgatgagtacagaaatattagccagaaggacattgaggacagcattaaaggagaattatctggacattttgaagacctgctgctggccatagttcattgtgcgaggaacactccagcgtttttggcagaaagacttcatcaggctttgaagggtgctggaacagatgaattcactctgaacagaataatggtttccagatcagagattgatcttttggacatcagacatgagttcaagaagcactatggctactctctatactcggccatccaatcagatacttctggagactacagaaccgtgctcttgaagatctgtggagaagatgattgaagaagatggctcccaatggctgcctgccctgatggtggaccgcctcaaaatctctgcacactgctttcatgcagcactctaaagtgcaagcaaatgcaagacagaacctgtctgcctgataggcattggcatcgttcagtgcaatggcaaaaatgaacttgattttatttcagaccatctcattcatgataagggaaattcaatctagaattaaagacctactaatgattttctgtttggcttaggaagttggaatctgtgtagttcaaaaccattaaacataaatcaggatactaaagatggctgcctttcctaattgtaatttgtgtatttgttttcagtatctactaatactgtatgttgcctggtgccaacaaatatttcaaaatacatttgttgtaaatgctcaaaaaaaaaaaaaaaaaaaaaa

SEQ ID NO: 24 - DNA, 6124 bp, Mus musculus
agcgacagcccgcgcactgggcaggagttactgctgctacggtcgcccgcgtcttcaaggtctctgcgcttcctcaccggagacctggactcggccgccatgtccgccgcggaggaggttgatggcctgggtgtggtccggccgcactatggctccgtcctggataatgagaggctcactgcagaggagatggatgagcggagacggcagaacgtggcttatgaatacctttgtcatctggaagaagcaaagaggtggatggaagcatgcctaggtgaggacctgccgcccaccacagagctagaggagggccttagaaacggagtctaccttgccaagctagggaacttcttctctcccaaagtggtgtccctgaagaaaatctatgatcgagaacagaccagatacaaggctaccggcctccacttcagacacacggataatgtgattcagtggctgaatgccatggatgagattgggttgcctaagattttttacccagaaaccacagatatctatgaccggaagaacatgccaagatgcatctactgtatccacgccctcagtttgtacctgttcaaactgggcctggctcctcagattcaagacctgtatggaaaggttgatttcacagaagaagaaatcaacaacatgaagatcgagctggagaagtacgggatccagatgcctgccttcagcaagatcgggggcatcctggctaatgagctctcagtggatgaagctgcgctacatgctgctgttattgctattaatgaagcgattgatcgcagagttgcagctgacacttttacggctctaaaaaaccccaatgccatgctcgtcaatcttgaagaaggcctggctcccacgtaccaagacgtgctttaccaggccaagcaggacaagatgacaaacgctaaaaacaggacggaaaactctgacagagaaagggacgtttatgaggagctgctcacacaagctgaaatccaagggaatgtaaacaaagtcaacacatcttctgccctggccaacatcagcctggctttagagcagggctgtgcagtgaccctgctcaaggctctgcagtcactggctctgggcctccgagggctgcagacccagaacagcgactggtacatgaagcagctacagagtgatctgcagcaaaagagacagagtggccagactgaccccctgcagaaggaggaggtacaggccggagtggatgctgccaacagtgctgcccagcagtaccaacgacggttggcagcagtggcagcaatcaacgctgccatccagaagggcatcgctgagaagaccgtgttggagctaatgaatcctgaagcccagctgccccaggtgtatccatttgcagctgatctctatcagaaggagttggccaccctgcagcagcagagccctgagcatagcctcacccatcctgagctcactgttgctgtggagatgctgtcatccgtggccctcatcaacagggcgctggagtcaggagacatgaccactgtgtggaagcagctgagcagctcagttacgggccttaccaacatcgaggaagaaaactgtcaaaggtatctcgatgagctgatgaagctgaaggctcaggcacatgccgagaataatgcatttattacatggaatgacatccaggcgtgtgtggaccatgtgaacctggtggtccatgaggagcatgagcggattttggccatcggcttgattaatgaagccctggatgaaggggacgctcagaagactctgcaggccctgcagatccctgcagccaagctcgagggcgtccttgcagaagtggcacagcactatcaagacacgctgatcagagcaaagagagaaaaggcccaggaaacacaggatgagtcagctgtgttatggttggatgaaattcaaggtggaatctggcagtccaacaaagacacccaagaggcccagaggtttgccttaggaatctctgccatcaatgaagcagtagacagcggtgatgttggcagaaccctgagtgccctacgttctcccgatgttggcttatatggagtgatccccgaatgtggggaaacgtaccagagtgaccttgctgaagccaagaagaagagactggcagcaggagataataacagcaagtgggtgaagcactgggtgaaaggcgggtaccattactaccacaacctggagacgcaagcaggaggatgggctgagcccccagactttgtgcagaattctgtgcagctttctcgagaggagatccagagctccatctctggagtaaccgctgcatataaccgagagcagctttggctggccaacgaaggcttgatcaccaagctgcaagcctgctgccgtgggtacctcgttcgacaggaattccgatcccggatgaattttctgaagaaacagatccctgccatcacctgcattcagtcacagtggagaggatacaaacagaagaaggcatatcaagatcggctggcttacctgcactcccataaagacgaagttgtgaagattcagtcccttgccaggatgcatcaagctcgaaagcgctatagagatcgcctacagtatttccgagaccatataaatgacattatcaaaatccaggctttcattcgggccaacaaagctcgtgatgactacaagactctcatcaatgctgaggacccgcctatgattgtggtccgaaagtttgtccacctcctggaccaaagtgatcaggacttccaggaggaacttgatctcatgaagatgcgcgaggaggtcatcaccctcatccgttccaaccagcagctggagaacgacctcaacctcatggatatcaaaatcggactgctggtgaagaacaagatcacgctgcaggatgtggtttcccatagtaaaaaacttaccaaaaaaaataaggaacagctgtccgacatgatgatgataaacaagcagaagggcgggctcaaggctttgagcaaagagaagagggagaagctggaggcctatcagcatctcttttatctcctgcagaccaaccctacctatctggccaagctgatctttcagatgccacaaaacaagtccaccaaattcatggactctgtgatcttcacgctgtacaactatgcatctaaccagcgggaggagtacctgctgctgcggctcttccagacagctctgcaggaggagatcaagtcaaaggtggatcagattcaagaaatcgtgacaggaaaccctacggttattaagatggttgtaagtttcaaccgtggtgcccggggccagaatgccctccggcagatcttggcccctgtcgtgaaggaaattatggatgacaagtctctcaacatcaaaaccgaccctgtggatatttacaagtcttgggttaatcagatggagtcgcagacaggagaggcgagcaaactgccctatgatgtgacccctgaacaagccttgtctcatgaagaagtgaagacgaggttagacaactccatcaggaacatgagggctgtgacagacaagttcctctcagccatcgtcagctctgtggacaaaatcccttatgggatgcgattcattgccaaagtcctgaaggattcacttcacgagaagttccctgacgctggtgaggacgagctgctgaagattatcggtaacctgctttactaccgatacatgaacccagccatcgtcgctcccgatgccttcgacatcattgacctgtcagcagggggccagctcaccacagaccagcgcagaaacctgggctccattgccaagatgctccagcacgcggcgtccaacaagatgtttctgggcgataatgcccacttaagcatcattaatgagtatctctcgcagtcctaccagaaattcagacggtttttccaattggcttgtgacgtcccagagctgcaggataaatttaacgtggatgagtactctgacctagtcaccctcactaagccagttatctacatctccattggcgaaatcatcaacacccacactctcctgttggaccatcaggatgccattgctccagagcataacgaccccatccacgaacttctggacgaccttggggaggtgcccaccattgagtcccttataggagaaagctgtggcaattcaaacgaccccaacaaggaggctctggctaagacggaagtgtctctcacgttgaccaacaagtttgacgtgcctggtgacgagaacgcagagatggacgctcggaccatcttactgaatacaaaacgtttaattgtggatgtcatccggttccagccaggagagaccttgactgaaattctagaaaccccagccaccaatgaacaggaagctgaacatcagagggccatgcagagacgggctatccgcgatgccaaaacccctgacaagatgaaaaaatcaaagcccatgaaggaggataacaacctcagcctccaggagaagaaagagaagatccagactggcctaaagaagctaacggagcttgggacggtggacccaaagaacagataccaggaactcatcaacgacattgccaaggatatccggaatcagcggagatacaggcagaggaggaaagctgaattggtaaaactgcagcagacgtactcggcgctgaactctaaggccaccttttacggcgagcaggtggactactacaagagctacatcaaaacctgcttggataacttggccagcaagggcaaggtctccaaaaagcctagggaaatgaaaggcaagaaaagcaaaaagatttctctgaagtacacagcagcgaggctgcatgagaagggcgtccttctggagattgaagaccttcaggcaaaccaatttaaaaatgttatcttcgaaattggtccaacagaagaagttggagactttgaagtaaaagccaagttcatgggagttcagatggagactttcatgttgcattatcaggacttgctgcagctacagtatgaaggagttgcagttatgaaattatttgatagagctaaagtgaatgtcaacctcctgatcttccttctcaacaaaaagttctatgggaagtaatgggtcgctcgccgcccagaagagttaacaaaaaacggcagcacctcacggctgtctttctaggatcctccattattccttagaagcaaggacctggtccagtggcggtgcctcagttcacactccctctgacggacggacggacgtcagtgccctctcccttctccttgtgaagccataagcctgacttcccctcagccctgctccctcattttctctcatcatgtaggaaagagtgggaccccctcccaacccctttctgttaaagcctcctaagtggtcattactactttgtagacattggtatttgttttacttagcaataagaatggtgaaattcaaattctcgtttagaagtgaaagctgtcaggttgatagcaagcatgcacatcaaattcaccagaagtacaacccatcggcgcagtcagaggatggagtctgatgtcttccggctgctgcctttgtgggcagagctaatccaagttactgttctctgttcaaatgaagcagcttcaggagaaaaagagcaattacttttgaattctccaataaatctggacaatgccgttagcgaagagcccttcctggtgaaggcaaacccatggtcagagcaggccatttagagactgagtgggcggggcacttaccatcccttccacaaaggatagcttcccccagctcaaaatgtaactgtttctaaactgtattccaagagtgccttaccaaagtataaatttatttcttaaaatgtgagtaataggaattttaaagatttatataatgcttttgaacactctgagaaagggttgttttttttcattgggttaatctgtatatctgaattcttgaagcttttctctagcctacagtagggtcgatctgccgagctgctgaataaccctgcttgattttagcaacaagagacaatccatgccatgcttttatcctgagaaacctggacccttaggctctgactaacaaagacagttcagctccagacactgaacttggaatcctttgtctttggattaaaagtcataaacttaaaaaa

SEQ ID NO: 25 - DNA, 2919 bp, Mus musculus
  modified_base (110)..(110): a, c, g, t, unknown, or other
  modified_base (153)..(153): a, c, g, t, unknown, or other
  modified_base (278)..(278): a, c, g, t, unknown, or other
  modified_base (322)..(322): a, c, g, t, unknown, or other
tctccagcctcaccctatcccgccccggtcccaggtccgcagcagccccacccggaaggttcccataggcacacaaacccgcttggctcggctccccagctccgcctcgnccggtcccagctccacctatccccgactctgtgccgcccagtnccagagcccgccccttctgggtcagccaattgtcacgtgaccgcgggcgtatccgagactgcctgagatcgacgctgtctaccaccagttcctcctcaatttcgaaccgcccttgtcccatggcnctggagcctcccgggtcaatgtgaagtgacttctgctcctgatnccaagcctgtgctggcacctctgggtgaacagggtcagatccccgctcgtgacgttaatgaagccctggtcctttaggggctctgtggagttacaccccaggccacccccttccgagttctgacagattcgctggagcttcagagagtggacctacagacagaaggattatttgggtctggcggctcaggggaggaggagggctcgggactggggcctcaggtaggggctggcctgggcgctcaaggaacgagcctgctggaatcgctctgccttccctaccaagggactgaggacacaggcccatctgtatctctgtcatggccctggggaccctctttttggcattggctgcaggcctgagcactgccagcccacctaacatcctgctgatctttgcggatgacctgggctatggggacctcggctcctatgggcaccccagttctaccacccctaacctggatcagttggctgaaggtggactacggttcacagatttctatgtgcctgtgtctctgtgcacgccatctcgggccgccctcctgactggccggctcccagttcgatcagccatgtaccctggagttctggggcccagttcccaagggggcttgcccttggaggagttgactttagccgaagtcctggctgctcgaggctaccttacagggatggctggcaagtggcatcttggagtggggccagagggggccttcctgcccccgcatcagggcttccaccgattcctgggcatcccatattcccatgaccagggtccctgtcagaacctaacgtgcttcccaccagacatcccctgcaaaggtggctgtgaccaaggccttgttcccatcccactactggccaacctgacagtggaggcccagcccccttggctgcctggactggaggcccggtatgtgtctttctcccgagacctcatggctgatgcccagcgccagggccgaccgttcttcctgtactacgcttcccaccacactcactaccctcagttcagtggacaaagcttcaccaagcgctcaggccgtgggccatttggggactccttgatggagctggatggagctgtaggggccttgatgacaactgtgggggacctcggtctgctggaagagacactagtcatcttcactgcagataacggtcctgagttgatgcgcatgtccaatggcggctgctctggcctcttgagatgtggaaaaggaacaacttttgaaggtggcgtccgagagcctgccttggtctactggccaggtcacattactcctggtgtaacccatgagctggccagctctctggacctgctgcccaccctggcagccctgaccggggctccgctgcccaacgtcaccttggatggtgttgacatcagccccttgctgctaggcacaggcaagagcccacggaagtctgtcttcttctacccgccctacccagacgagatccatggggtctttgctgttcggaatgggaaatacaaggctcatttcttcacccagggctccgcccacagtgacaccacttcagatcctgcctgtcatgctgccaaccgtctgacggctcatgagcccccactgctctacgacttatctcaggaccctggggagaactacaatgttttggaaagtatagagggggtctccccagaagccctccaggctttgaaacacatccaactcctcaaggcccagtacgatgcagccatgacctttggccccagccagatagccaagggcgaggaccctgccctacagatctgctgtcagccgagctgcactccccaccctgtctgctgccactgcccaggctcccagtcctgaggggactggagaaatcacgggggtccttcaagggtagcccaggacccctagccctgtcctgagtgtgtgatggttcaccagagggacagggacaagtgtgtagtttgtatctggtaatgtaataacaccagctgagacttgagacgtgctaattcatctagtccttgtggtaactctgaggtcagtactattctgctgtgctacaagacaaggacattgacgcatagggaatctcgtggacctttccaagtccgatgccaccttaccagaaagagcttgagctaggatttgaacccaggcaccctgggtttaaaatttgtcccaccctggtgatctgcgtgtgttccatggacacaccgctgaagcaagacatgtcccttcacagaaaccggtaatgagttcaagtgccaggaactgggggtggggggagtggtgagggcagaggaaccctaaagatgcaaagcacctggaagacaggctttcctcaagaagcaatgccagaggccctggaactggtcagcttggttctttaaagaaatcagctgtctggagttaggtgataaactgatcattccgggtagagttaaaggacctggggaccctgctagatcccaggaaggaccatcagcagcttctgagactgcctcatggggctcacttgtctctcaagctctgaatttctcctttgtgcatacttcaagtaattttctacaaaaaaaaataataaaaataaataaaataaaataaagttgtctac

SEQ ID NO: 26 - DNA, 4416 bp, Mus musculus
gggggctcgggggcgggagcggcggtagcttcgcgcggagtccccggggagtggcggcggtgtccctgggcccggaggagcgaacacctgccgcggcctgcccgtggtgctgggtgagtgcgcctcccgcctctgcctcccggtgcctgcctgctggggccgggatccccgctgcagccgaccgagccttccgcggaacacctgctgctgctccctttcggcccggggcggggacacggccacggacgtccttgcggggcctgtgctctctaggaagataaggttttcaacactgcctggcactggagggtgaggctctgggtgctctaggatggaacagctgtgcagagggtgaggatccaaccctgggaccacatcatttgctttcttccttagcaactggtggcttgaacaaacactagcctgggtgaggatgtctgtggacaactggctactgcaccccctctggggacagacctttctcctcctcctgtctgtggctgtggctcaggcccactggcccagtgaaccctcagaggctgtgagggactggaagaaccagcttgaggcgtccatgcactcagttctctccgacttccaggaggctgttcccaccgtggttggcattccagacggtacggctgttgtcgggcgctcatttcgagtgagcattccaacggatttaattgcctccagtggggagatcatcaaggtgtctgcagcagggaaggaggccttaccgtcttggctacactgggacccacacagtcatattttggaaggccttcctcttgacactgataaaggtgtgcattacatctcagtgagtgctgcacgcctgggagccaatggaagccacgtcccccagacttccagtgtgttctctatcgaggtctaccctgaagaccacaatgagccacagtctgtacgggcagcctcatcagaccctggtgaggtagtgccatctgcctgtgctgctgatgagccagtgactgtccttacagtgattctggatgctgacctcaccaagatgaccccaaagcaaaggatcgatctgttgaacagaatgcagagcttctcagaagtagaacttcacaacatgaagttggtgcctgtagtgaataatagactatttgacatgtcggccttcatggctggcccaggaaatgcaaagaaagtggtagagaatggggctctcctgtcctggaaactaggctgctccttgaaccagaatagcgtccctgacatccgtggtgtagaaacccctgctagggagggtgctatgtctgcccaacttggttatcctgtggtgggttggcacattgccaataagaagcccactctccccaaacgactccggaggcagatccacgccacacctacacctgttactgccattggacccccaaccacggccattcaggagccaccatcgcggatagtgcctacgcctacatctccagccattgcacctccaacagagaccatggctcctcctgtcagggatcctgttccagggaagcccacggtcaccattcggacgcgaggtgccattattcagaccccaactctgggccctatccagcctactcgggtgtcagaagctggtaccacggttcctggccagattcgcccaacactgacaattcctggctatgtagagcccacagccgttattactcctccaacaactaccacaaagaagccacgagtgtccacgccaaagccagcaacgccttcaactgattcgtcaactaccacaactcggaggccaaccaaaaaaccacggacaccccgaccagtgccccgagtcaccaccaaagcacccatcaccaggttggagacagcttccccacccactcgaatccgtactaccaccagtggagtgccccgtgggggagaacctaaccagcggccagagctcaagaatcacattgacagggtagatgcctgggtgggaacctattttgaggtaaagattccatcagacaccttctatgacaatgaggataccactaccgacaagctcaagctgaccctgaagcttcgagagcagcagttagtaggtgagaaatcgtgggttcagtttaacagcaacagccagctcatgtatggcctgcctgacagcagccatgtgggaaaacatgagtattttatgcatgccacagacaaagggggcctctccgctgtggatgccttcgagatccatgttcacaagcgcccacaaggggacaaggctcctgcacggttcaaggccaggcttgcaggggatccagcaccggtggtgaatgacattcacaagaaaattgctttggtaaagaagctagcttttgcttttggggatcgaaactgcagctccatcacccttcagaacatcactcggggctctatcgtggtggaatggaccaacaacactctgcccctggagccctgccccaaggagcagatcatagggctgagccgcaggattgctgatgaaaatgggaagcctcgtcctgccttctccaatgctctggagcctgactttaaggctctgagtattgctgtgacgggctctggcagttgtcggcacctccagtttatccctgtggcaccaccctctcctggaagctcagctgcaccagccacagaggttccagacagggaccccgagaagagcagtgaggacgatgtttacctgcacaccgttatcccagccgtggtggtcgcggccatcctgctcattgctggaatcattgctatgatctgctatcgcaagaagaggaagggcaagctgacccttgaggaccaggccacctttattaagaagggggtgcctatcatctttgcggatgagctggatgactctaagcccccgccctcttccagcatgccgctcatcttgcaggaagagaaggctcccctcccacctcctgagtaccccaaccagagtatgcccgagaccactcctctgaaccaggacactgtgggagagtacacacccctgcgggatgaggatcctaacgcacctccctatcagccacccccacccttcacggctcccatggagggcaagggctcccgtcccaagaacatgaccccataccgatcaccccctccgtatgttcccccttaacccacaagcgcctgggtggaggcaggggtagggcaggggcctggagacaacttggtgttgtctgtagagaccggtggcccacaggccattgcccactggtccccaacacctgacctagcacacactgacaacagggcctggacaagcccgccctctctggtcctcccaaaccccaaagctgctggagagactttgggggacttttttattttcattttttgcctaacagctttttgtttgttcatagaaaagtcttcgctgcgttttttgatggctctgaagcactgtttgagtagaggtagaaggagggagcgaggaaccgtgaatgaactcgcaggcagtgctgggcggccccagctctctgcattttgcctttaacactaactgtactgttttttctattcacgtgtgtctagctgcaggatgtaacatggaaaacagtagctaaagattacattcaaaggactttcagaaattaaggttaagtttttacatttaatctgctgtttacctaaacttgtacgtataatttttgggtgggtatgggaaattgctttgctaaaaataagatcccagggtgtttcaaacttagagaagaccaagggacagtattttttatcaaaggaatcctattttttcacactatgtcaacttggttgctctgatatcccagagcctgactgagggcctcctggtcctggctcgggtgccagggccctggtgctgggttcgctctcccgctgttgccaggggctggaagctggaggggcctcttgggccatggacatcctgacctctaccccatgcacgctagtggcctaccaccaagggggtcttcatttctgtgggaaagggactccaaaaggcattggtggctatggcctccaacctaggtgctccaaggtgggccagctgctcgtaggggcacctgggaaggtcgaaggactccacctcatcaacctttcttttcccttctctgtggtttggtttggtttggttctgttctttcccttccctcttaaaaggaatatcacggtctttgaaacactcagtgggggacattttggtgaagatgcaatatttttatgtcatgtgatgctctttcctcacttgaccttggccactttgtcccaacagtccacagccctaccccatataccctgcccctcttctctggcgctccagtcctgggccgtgggcctgtggctggggaggagtgccagcaatagttcatagtaaaagtctgtgggctctcaaagctaattttttactaaagtttttatacagcctcaaattgtttt

SEQ ID NO: 27 - DNA, 5583 bp, Mus musculus
ccacgcgtccgggacaccagcccagtacccacacggtcgggatggagtgggcctcaggagaaccagggaggggcaggcagggacagcctttgccatgggaacttcgcttgggcctacttctaagtgtgctggctgccacattggcccaggccccgtccttggatgtacctggctgttctcgaggaagctgctatccagccaccggtgacctgttggtgggccgtgcggacagactgacggcctcatccacgtgtggcttgcatagccctcaaccctactgtattgtcagtcacctgcaggacgaaaagaagtgtttcctgtgtgactcccgacgtcccttctctgctcgagacaacccaaatagtcatcggatccagaatgtagtcaccagctttgcgccacaacgccggacggcctggtggcaatcggagaacggggttccaatggtcaccatccaactggacctggaagctgagtttcatttcacccacctcattatgacgttcaagacgttccggcctgctgctatgctggtggagcgttctgcagactttggccgcacctggcacgtgtaccgatatttttcctatgactgcggggctgacttcccgggaatcccactggccccgccacgtcgctgggatgatgtagtgtgtgagtcccgctactcagaaatcgagccgtctacggaaggcgaggtcatctatcgtgtgctggaccctgctattcctatcccagacccctacagctcacggattcagaacctgttgaagatcaccaacctacgagtgaacttaacccggcttcacacactgggagacaacttgcttgacccacggagggagatccgggaaaaatactattatgctctctatgaacttgtcatccgtggcaactgcttctgctatggccacgcctcacagtgtgcgcctgcaccaggggcgccggcccatgctgagggcatggtacacggagcctgtatctgcaagcacaatactcgtggactcaactgtgagcagtgtcaggatttctatcaggaccttccctggcaccctgcagaggacggccatactcacgcctgtcggaagtgtgagtgcaacgggcatactcatagctgccactttgacatggctgtctacctggcatctggaaatgtaagtggaggcgtatgcgatgggtgtcagcacaacacagctgggcgccattgtgagttctgccggcccttcttctaccgtgaccccaccaaggacatgcgggacccagctgtgtgccgtccttgtgactgtgaccctatgggttctcaagatggtggtcgctgtgattctcatgatgaccctgtgctaggactggtctcaggccagtgtcgctgcaaagaacacgtggttggcactcgctgccagcaatgccgtgatggcttctttggacttagtgccagtgaccctcgagggtgccagcgttgccagtgtaattcacggggcacagtgcctgggagctccccttgtgactccagtagtggaacctgtttctgcaagcgtctggtgaccggacatggctgtgaccgctgtctgcctggccactggggcctgagccatgacctgctgggctgccgtccctgtgactgtgatgtgggcggtgccttggatcctcagtgtgatgaggccaccggtcagtgccgctgccgccaacacatgattgggcggcgctgcgaacaagtgcagcctggctacttccggccttttctggaccatttaacctgggaggctgaggctgcccaagggcaggggcttgaggtggtagagcggctggtgaccaaccgagagactccgtcctggactggcccaggctttgtgcggctgcgagaaggtcaggaagtggagttcctggtgacctctttgcctagggccatggactatgacctgctactgcgctgggagccccaggtccctgagcaatgggcagagctggaactgatggtgcagcgtccggggcctgtgtctgctcacagtccgtgcgggcatgtgctgcctaaggatgaccgcattcaggggatgcttcacccaaacaccaggtttttggtgtttcccagacctgtctgccttgagcctggcatctcctacaagctgaagctgaaactgatcggaacagggggacgagcccagcctgaaacctcctactctggattactcattgactcgctggtcctgcagccccacgtcttggtgctagagatgtttagtgggggcgatgctgctgctctggagcgccgtaccacctttgaacgctaccgctgccatgaggaaggtctgatgcccagcaaggcccctctatctgagacctgtgcccccctcctcatcagcgtgtccgccttgatctacaatggcgccttgccatgtcagtgtgaccctcaaggctcactgagttctgaatgcagtcctcacggtggccagtgccggtgcaaacctggagtggttggacgccgttgtgatgtctgtgctactggctactatggctttggccctgcaggctgtcaagcctgccagtgtagtcctgatggagcactcagtgccctctgtgaagggactagtggacagtgcccctgccgacctggtgcctttggtcttcgctgtgaccactgtcaacgtggccagtggggattccctaattgccggccgtgtgtctgcaatgggcgtgcggatgagtgtgatacccacacaggcgcttgcctgggctgccgtgattacacggggggcgagcactgtgaaaggtgcattgctggttttcatggggacccacggctgccatatgggggccagtgccggccttgtccctgccctgaaggccctgggagccagcgacactttgctacttcttgccaccgggatggatattcccagcaaattgtgtgccagtgtcgagaaggctacacagggcttcggtgtgaagcttgtgcccccgggcactttggggacccatcaaagccaggtggcaggtgccaactgtgtgagtgcagtggaaacattgatcccatggaccctgatgcctgtgatccccacacggggcaatgcttgcgttgtttacacaacacagaggggccccactgtggctattgcaagcctggcttccatgggcaagctgcccgacagagctgtcaccgctgtacctgcaaccttctgggcacagatcccaggcggtgcccatctaccgacctgtgccattgtgacccaagcactgggcagtgcccatgccttccccatgtccaaggcctcaactgtgaccattgtgcccccaacttttggaacttcaccagtggccgtggctgccagccttgtgcttgtcacccaagccgggccagaggccctacctgcaatgagttcacagggcagtgtcactgtcatgctggctttggtgggaggacttgttctgagtgccaagagctctactggggagaccctggtctgcagtgccgtgcctgtgactgtgatcctagaggaatagacaaacctcagtgtcatcgttccacaggccactgtagctgccgcccaggcgtgtctggtgtgcgctgtgaccagtgtgctcgtggcttctcaggggtttttcctgcttgtcacccctgccacgcttgctttggagactgggatcgtgtggtacaggacctggctgctcggacgcggcgcctggagcagtgggctcaggagttgcagcaaacaggagtgctgggtgcctttgagagcagctttttgaacatgcaggggaagctaggcatggtgcaggccattatgagtgcccgcaatgcctcagccgcctctacggcgaagcttgtagaggccacagagggactacgtcatgaaatcgggaagaccaccgagcgcctgactcagttagaagcagagctaacagctgtgcaggatgagaacttcaatgccaaccatgcactcagtggtctggagagagacgggcttgcgcttaatctcaccctgaggcagctggatcagcatctggagatcctcaaacattcaaatttcttaggtgcctatgacagcatccgacatgcccacagccagtccacagaggcagagcgccgtgccaacgcctccacctttgcagtacccagccctgtgagcaactcagcagatacccggcgtcggacggaagtgctaatgggtgcccaaaaagaaaacttcaaccgccaacatttggccaaccagcaggcactgggacggctctctgcacatgcccacaccctgagcctgacgggcataaatgagttggtgtgtggggcaccaggggacgcaccctgtgccaccagcccttgtgggggtgccggatgtcgggatgaagatgggcagccccgttgtggtggcctcggttgcagtggggcagcagccacggcagatctagcgctgggccgggctcggcacacgcaggcagagctgcagcgggcactggtagaaggtggcggcatcctcagccgggtgtctgagactcgtcggcaggcagaagaggcacagcagcgagcacaggcagccctggacaaggctaatgcttccaggggccaggtggaacaggccaatcaggagcttcgagaacttatccagaatgtgaaagacttcctcagccaggagggagccgatcctgacagtattgaaatggtagcgactcgggtgctagacatctccatcccggcctcacccgagcagatccagcgcctagccagtgagattgcagaacgcgtccgaagcctggccgacgtggacacaatcctggcccataccatgggcgacgtgcgtcgggctgaacagctactgcaagatgcgcaccgggcacggagccgggccgagggtgagagacagaaggcagagacagtccaagcggcactggaggaggctcagagggcacaaggagctgctcagggtgccatctggggagcagtggttgacacacaaaacacagagcagaccctgcagcgggtccaggagaggatggcaggtgcagagaagtctctgaactctgccggtgagcgggctcggcaattagacgccctcctggaggccctgaaactgaaacgggcaggaaatagcctggcagcatctacagcggaagaaacagcaggcagtgcccagagccgtgccagggaggctgagaaacaactacgggaacaagtaggtgaccaataccaaacagtgagggcgttggcagagcggaaggctgaaggtgttctggctgcacaagccagggcagaacaactgcgggatgaggctcgggacctgttgcaggccgctcaggataagctgcagcggctacaggagctggagggcacatatgaggagaacgagcgtgcactggagggcaaagcggcccagctggatgggctggaagccaggatgcgcagtgtgctccaggccatcaacttgcaggtccagatctacaacacctgccagtgaccactccctagggcctagccttgtcgccaagcactgttctgcacacgatcgtccgcacattaaagagctcctggctagcaagagctttcaataaacctgtgtgaacctcaaaaaaaaaaaaaaaaaaaaaaaaaaaaaaaaa

SEQ ID NO: 28 - DNA, 723 bp, Mus musculus
gcttgcaccacctccctgagcctagcgggaacagcagtagcagtccctctaacacagactcccaagtagccctcataattgggagggatgagaccctgtggtccttcctgatcaggctgtgtcccagtcgcgtggcgctgtgttgggatggctagtgacagcaggggcggtcccctcagcggaggcggaaacttgacacttcagacttgggagtggctctcgccttgcctggtgcttataaacttcagcctcagggctccagatcggttagctgcatcccaccttctttcccggtcaatctgtgtggacatcagctcctgctttggtatactgatggcagcagagactctgactgaactggaggcggccattgagactgtggtctctactttcttcacctttgcagggcgggaaggacgcaaaggcagcctgaacatcaatgaatttaaggaactggccactcagcaactgcctcatttgctcaaggacgtgggctctctagatgaaaagatgaagaccttggatgtgaatcaggactcagagctgaggttcagtgaatactggagactgattggagagctggcaaaggaagtcaggaaggagaaggccctggggatccggaagaagtaaagcttgctgtccagcaggacctgttgggcagagccaggcagcactccacccctgcccccaaataaagctttcttcttgaaaaaaaaaaaaaaa

SEQ ID NO: 29 - DNA, 2335 bp, Mus musculus
ggctcactgctgcggctgcgcctccttgttctcagcgtcaccactgccgccatgcccggagggttgcttctcggggacgaagcccccaactttgaggccaataccaccatcggccgcatccgcttccacgatttcctgggagattcatggggcattctcttttcccacccacgggactttaccccagtgtgcaccacagaacttggcagagctgcaaagctggcgccagagtttgccaagaggaatgttaagttgattgctctttcaatagacagtgttgaggatcatcttgcctggagcaaggacatcaatgcttacaatggtgaaacacccacggaaaagttgccatttcccatcattgatgataagggcagggaccttgccatccttttgggcatgttggatccagtcgagaaggacgctaacaacatgcctgtgacggcccgtgtggtgttcatttttggccctgacaagaaactgaagctgtctatcctctaccctgccaccacgggcaggaactttgatgagattctcagagtggttgactctctccagctgacaggcacaaagccggttgccaccccagttgactggaagaagggagagagcgtgatggtagttcccaccctctccgaagaggaagccaaacaatgtttccctaaaggagtcttcaccaaagagctcccgtctggcaaaaaatacctccgttatacaccccagccttaagtctttgcggaaattggggctgcatctgcacatccagtactggggcctgaggatgtcagctggcagccgtgggtccttgcagcaggtccgtagaaagatcgtggcatgatcacagccggtcctgtagatcgctcgctatactactgggtcattaaatggaaatggcaccaaaaccttctcgggattctttactctgtgccttcgccagcattctgcccctctgcctgtcacagtgccctactgactggctctctttgaaacgaattatgtattgaagattccttaggtctctgtagggtctttgatcagcaaacaaggtagtgtcagtgtgggctctgtgctagaatgatgaaacaccttttgtatctttccgaactgaatcttctgttacccattttggagagcactgacatagggagaagctttcgattctgtatttttagtaaataaaaagtggggacagccgggagaattcttacagggaatctattgtaagtttctatcgaagtgggctcagaaagcctttcgcctcccaagagtgcgcatgtacctcctagagtttccacatctgctctctggtgatgtctgcctgtgaacgcaccttataaaagacgggcggtgacagtgttttaccactcagtgtcctagtagtgggtggccatttctgaattctgctttttgaggttcaacaaataaaatcctgatcagaaaaccgttgtcatgttttaaagtactactatcttagactctagcatgtctattgcacaggcatgcttccttcttgctgggaatagcatgggtatgtttctccaacaacatgagtctccgcatgaactggaagccactgaaggatgaattcctacatgtatgttaggctaattccttggttcctgttctcctaagtcttgtgaacaggtgtgcaccttctcagaggttctcaacttgtggctcataacctctttggtcaccaaggaccaatggaaaatatttacattacagttcataacgatagcgaatttacagttaggaagcagaaacaaaaataattttatgtttaggggtcaccgcaacattaggaaggttgagaaccactaatggttaggtagtctggcctcattagtgtaagctctgagatagtggtatattttgtttttctactctgaactgaatggtttcattccaacttagatacagtgctactagtccaagtcattgtgagtcttagtctaggttgtaacaaagatgcctggcttgagcatgggatgtttatttctaggtgtcaagctggagagttaaattcaaggcagtggtgggtcctaggtcatcctcctcctaggaggcacctcactgcttgctcttttccattacacacgtaattactttggtccctgcttttaatgggaagtctggcttccagttcctgttgaggcgtttctggtttttgtgtgtttatgatactggcttgttttgtatgtagcccaggctagacctgaaatctttcctgctgccacagctccccaggggctcagattacaaatgttaccatcatgccctatgccatcagctttgatgacaaaagttcaaaatctaaactgccattgttgatcat

SEQ ID NO: 30 - DNA, 925 bp, Mus musculus
acttcttgttctcttcccacactctgttctcagcctcctccgctcccctccgcctgttctcaggatcatgaaggtcgccagtggcagtgccgcagccgctgcaggccctagctgttcgctgaaggcgggcaggacagcgggcgaggtggtacttggtctgtcggagcaaagcgtggccatctcgcgctgcgctgggacgcgcctgcccgccttgctggacgagcagcaggtgaacgtcctgctctacgacatgaacggctgctactcacgcctcaaggagctggtgcccaccctgccccagaaccgcaaagtgagcaaggtggagatcctgcagcatgtaatcgactacatcagggacctgcagctggagctgaactcggagtctgaagtcgggaccaccggaggccggggactgcctgtccgcgccccgctcagcaccctgaacggcgagatcagtgccttggcggccgaggcggcatgtgttccagccgacgatcgcatcttgtgtcgctgaggcggcgcactgagggaccagatggactccagcccttcaggaggcaagaggaaaaaagtgctctcggttccccaggggatctctgggaaagacactaccgcagccaccggactcttggcggatcggtccagtgggtagagggtttgatcaacagagcctcaccctctccacctttcagcctccagagactttggggagggggttaatcaaccccgcgtgtttctgttttattgaaaaagcagacattttttttaaatggtcacatttcgtgcttctcggatttctgaggaaatattttgtattgtatattacaatgatcactggctgaaaatattgttttacaatagttctatgggggtgggttttttgttgttattaaacaaacactttagataaaaaaaaaaaaaaaaa

SEQ ID NO: 31 - DNA, 386 bp, Mus musculus
gatcacgctcctagaactcttcaaaccgatctctcgtcgatcttcaaccgccgcctccactcgccatggaccccaactgctcctgtgcctccgatggatcctgctcctgcgctggcgcctgcaaatgcaaacaatgcaaatgtacttcctgcaagaaaagctgctgctcctgctgccccgtgggctgtgcgaagtgctcccagggctgcatctgcaaagaggcttccgacaagtgcagctgctgtgcctgaaggggggcggaggggtccccacatctgtgtaaatagaccatgtagaagcctagccttttttgtacaaccctgactcgttctccacaactttttctataaagcatgtaactgacaataaaagccgttgacttgatt

SEQ ID NO: 32 - DNA, 3691 bp, Mus musculus
ggggcagtagtggcgggggcttggtagaagtccgtaccggactaggggatccagttctgagaggaagactaaggcggcggggcttaccctgtgaagacttttccactgaatctcatctttttctggaaaactggcaatgaaccatatggggatgaaccatatggagatgcaccaccatatgggtatgtaccacacggacgacaacattaccatgccacctcaccaccacccgaccacctcagcctcacactcccacggtggaggggacagcatgatgatgatgcctatgaccttctactttgactttaagaatgtgaatctattgttttccggtttggtaatcaatacacctggagaaatggctggagccttcgtggcagtgtttttactagcaatgttttatgaaggactcaagatagcccgagagggtctgcttcgaaagtctcaagtcagcattcgctacaattccatgcctgtcccaggaccaaatggaaccatcctaatggagacacacaaaactgttgggcagcagatgctgagcttcccccacctcctgcagacagtgctgcacatcatccaggtagtcatcagctacttcctcatgctcatcttcatgacctacaatgggtacctatgcattgcagtagcagcaggggctgggacgggatactttctcttcagctggaagaaggcagtggtggtggacatcacagagcactgccattgatatcagactccacatatggccttattaattgctgtaggaagcatcttgggactggaagatatgattccctttccaatcatcccttctctctcctgtctatacatacacacctactgaatagaagcctagctgacagtctctgaatagtggtttttctaataagatgagatttttttctcttgggaagtcacctgtgagatgtcttctccctcatcatcctgagccttatctaatccaggtagcttcctagttaaagacttggttatctgcttctttttacttctccaggttttgatttgttttgttttgttttatttgcggggggagtgggatacattttgttttaaacagatatgtgtatttgataggtgggattctgggtcagtgataaaaaaggattgtaacaggattgatggcacttagggacatctcatccaaccgggacttaaatttcacactagaaatgagctccagtcttaactcagtgaatgggaaacacatgttcctctctccaggttacactgaaacctgtgtagtgtgtacagagtgggtagggactaaacacaggcctagcgtctatgagtctgtattcctgctcagtcatcaacttgtgttcctattgaacatttgatcagaatgaacttgccaatcaaaacaaaaacaggacaatcaatttaagacaacagaaatagagattgttaaataaaaccattagtattttactttgactcagtaccttggtttgtcccaactgaataagagtttgtattgtgtgtgtgttccttgaaaccaatgattttcaaactttacagcttcagaatcacccagagggcttgttaagacactacttggtggacctcaaccccagaaccaccaaatttggcatttctaagttcctaggtgatgttctactcacagtcagtccagaggattaccttaagagtctctgcattaaactagaaaagttgcacctagaagggacagagggtggggctacctgctatcaggcatgaacatgtgaattgctggttagtaggtggtatgccttgggcacatgtcacatctaaatgctgctggtcgatactttatcattccacaaacatttattcacttccaaatatgttttatgtatacccacatacagtgtgtgggattacagccaaagtatacttgtcaacatatacgaagtctctagtcctaacttttaaagatctaaggttccttggaagttatttgaaggccaagagacctttgctctgctgtgtgagtcagccagtcaaaagcccagaaaggcaaaaacccagctttcttgtttggagagacatggggcatgtgtctgccaatagccagttgttctcagtgtgcactatgtaggtccccatccactacttgaccacctttatcatttacggggatttacatagattacagtggccaagacccctttctcaatgaaggatctcattggacgtcctgtcaatcattaatctacatgcaggcttgttcccacactacctctttaaagcgattcttcctatgctggtctgttcaatcctgccctctttggtgctagatccagttgtgcctcagagcagaagaaacaaacctgctgtcttgttggcccagtgtttcagttttgaagtgtgtaccttctcctctgtgtgtgccaattacatattagagaacaaggaatgtgtactttggtggctttgaaccaagaaaaggttttaagcctactggatggagtctaaaattcttagaaatcaactttagagctttgcttttctctgagttcatcctgcagtgaatgacaggtactgacagcccaacattaaggtgcaaatagcctgtttgtcatatcagaagccatggaataataaacccaggggaatccagaaaccacacttagtggtaaccctggtgctctctagaatctccaaatgagctgctataaaacacctttcaggggctgagatgcagctctggtgtgagtcacttacctagcttatgtcaggcccctaaaagtaatgcataaactgtcagaatcgggaccttatcgttgaggtgaaaagaaccaaggcccgtaggaacaaggtgctatgaatctgaaaccaagagaaacctcagtttggcatggttcttcagggtagcttccgagtagaaatagtctgctgcaaatcctaaacttaagatccctgcgctaggttgctagagactgcggttagtgcagaacagaggtaagcctaagtcccatcctcatgaacttcaatgcccagcctttgtgtttattttatctaaatgtctcctttcatctgtgggaaagctatagctgagtgtctttagcccctgccctacttttccctctctgacttttttcccaggtagcttagtgtttaacatctctctcaccatcctgatgcagtagcatggctattgctgaggttattttacctaataattagaactttgtatttacaaagcaagtagaggtcttaaatttgcttcaagaagcagttgctccactggaatttctataaagctgggtaaagggttagcagaattacagatcttaagtactaactgcagtccaagatggaagagtactcagcagccactgccctcatcaggaacctcctcggcatccatcagtctcctcactgctcctgtgcgcagggctgtccctcccacactcccttccaggccgtggccttcgcttcctcattagaatcaggagagtgaggcacagtgtccatcatgccatttaatcttgtgcctgccctttccagcctcttcaaaagatgcatccaaacaacaggtctgcatttgatgtaatgccttaattactggggccacattcacgttgactgtctcagagactgtaagctcccggagagcagggttgctgtaatgggaatgtttaagtgttgtgtgcaagaaaacaaaataaatattttgattttcgtc

SEQ ID NO: 33 - DNA, 3857 bp, Mus musculus
ccacgcgtccgagcgctggcagctgcgtgcgcccaggcgcgagctgccgggcgggtggagaggagcgcggtgcgctgtgcgcggtgcgggctgcggctgcagacgccgctgggccggagcgcggggtcagcacatggtttgggacttgcacgttctgccatggaggagtcttcagtgacagttggcacaatagacgtttcttatctgcccagttcatcggaatacagccttggccgatgtaaacacaccagtgaggactgggttgactgtgggttcaaacctaccttcttcagatctgcaacactgaaatggaaggagagccttatgagccggaagaggcccttcgtgggaaggtgctgctattcctgcacgccacagagctgggaaaggtttttcaaccccagtatcccatctctgggtttgcggaatgttatttatatcaatgaaacgcacacaaggcacagaggatggctggcgagacggctgtcttacatcctttttgttcaagagcgagacgtccataagggcatgtttgccaccagtgttactgagaatgtactgagcagcagcagagtccaagaggcaattgctgaagtggctgcggagttgaacccagatggatctgcccagcagcagtccaaagccatccagaaggtgaaaaggaaagccaggaagatcctccaggagatggtcgccaccgtctccccagggatgatcaggctgactggctgggtgttactaaagctcttcaacagcttcttctggaacattcagattcacaagggtcaactcgagatggtcaaggctgcaactgagacgaacctgccgctcttgtttctgccggtgcacagatcccacattgactacctgttgctcaccttcatcctcttttgccacaacatcaaggcgccgtacatcgcctcgggcaataatctcaacatccccgtcttcagtaccttgattcacaagcttgggggctttttcataagacggaggctcgatgaaaccccagatggacgcaaagacattctgtacagagcgttgctccatgggcatgtagttgaactcctccgacagcagcagttcctggagatcttcctggaaggcacccgctcccgcagtggcaagacctcctgtgcccgggcagggctcctctcagtggtagtggatactctgtcgtccaacaccatccccgacatcctcgtcatacccgtgggcatctcgtatgatcgcataatcgaaggtcactacaatggcgaacagttgggaaagcccaagaagaacgagagcctctggagtgtggcgagaggcgttatcagaatgctgcggaaaaactacggctacgtccgagtggattttgcacagccattttccttgaaggaatatttagaaggccagagtcagaaacctgtatctgcccccctttctctggagcaagcactgttaccagcgatccttccttcaagaccgaatgatgttgctgatgaacatcaagacctatccagtaacgagtccagaaacccagcagacgaagccttccgacgaaggctgattgcaaacctggctgagcacattctcttcaccgccagcaagtcctgcgctatcatgtccacccacattgtggcctgtctgctcctctacagacacaggcagggaatccatctctccacgcttgtggaagacttctttgtgatgaaggaggaagtcctagctcgcgatttcgacctaggcttctccgggaattcagaagatgtcgtcatgcatgctattcagcttctggggaactgtgtcacaatcacccacacgagcaggaaagatgagttttttattactcccagcacaactgtcccgtcagtctttgaactcaacttctacagcaatggcgtacttcatgtgttcatcatggaagccatcatagcttgcagcatctatgcagtcctgaataagaggtgctctggagggtccgctggaggcctcggcaacctgatcagccaggagcagctggtgaggaaggccgccagcctgtgctaccttctctctaacgaaggtaccatttctctgccctgccagactttttaccaagtttgtcatgagacagttggcaagttcatccagtatggcattctcacagtggcagagcaagatgaccaggaagatgtcagtcctggccttgcagaacagcagtgggacaagaagcttccggaactgaactggagaagtgacgaggaagatgaagacagtgactttggtgaggagcagcgagattgctatctcaaggtgagccagtccaaggagcaccagcaattcatcacctttcttcagaggcttctaggtcccctgctagaagcctacagctctgctgccatctttgtccacaacttcagcggtccagttcccgagtctgagtacctgcagaaactgcacaggtaccttatcaccaggacggaaaggaacgttgccgtgtacgctgagagtgccacatactgtctcgtgaagaacgctgtgaaaatgtttaaggacatcggggttttcaaagagaccaagcaaaagcgagtgtctgttctagaactgagcagtactttcctacctcagtgcaaccggcagaaactcctagagtatattctgagttttgtggtgctgtagcgatctctcagcacctatctcgagcgaggagctgatgagtcccttgcagcctccagtctgacccagagtggcaggtatcctggcatggcccagcctgccctaccccgaggagacttccaggaagacacgtgccttctgcccccgtggacctgcgctcctcccaacacagacgcagtggcctgcgcagagcactcagggccagtgccatctgtgattcatgatcactaggttataggtgaaatctcagtaagttattttggagtttattaaaggttcacattttaagtacaacttttcaggctagttactgtgatggacattgaggtgtttgtagaactgactcttatatagtaagtaataatgtttcctttaaaataattgggccatccattctctgtctccattatcgctgtcaacagaagttatggtttgtatgtgagccctttcctctcaactgctttactaaggagcaatgttgtcctgcgccggcacactcaagatgtatctgagtagctgcctgaaagcagatgacactgcagtcaggaggtgagaggctgaggaaagagccagcatcaggaggtgactctggttggcaagggtgagctgtgcttggccaggaaggtggcattaaaggctgtgctcacgtgacaagagtgcctttgagctgtaatgaccagtgtttagagtccctgttgctgatacctttgagtgattgacacctgctgcttttgaggagctcggctgcagtgatcactggcgtgtggcactctggctacaaactgctgacccaggggttccagacactgctcactcactgggtgctgtgctgtggctagtgtatggcttgtacccagatggcgcactgtgcagcctgtgtagcatgcacagtgacccagctgagtggcaggtggttggaggcaaggacatttatgtgggccacatacccaaacttcctgccatgtaaaggcgagtgattgtgaaagcacctctgttgtagtgggtaggtgcctttctcatgagcggggagcataactgttagttatttgtggtgattatggcagatttcaagatcacgtgacaatgcagtctctaattgttcactgtccatatatatgattttacggaattatgaatttttctgatgagtgttgtatagatgatttgaattgataaaagtattagggatgaggtttgtaaaaaaaaaaaaaaaaaaa

SEQ ID NO: 34 - DNA, 1087 bp, Mus musculus
gcttaaagaagacgccttgaccacacagttcctgtgataacagctctgccactcccctgcccgctgggagtaataagcctaaggcccaaatatgaagcctgcagcagccctgaggaggccctctgagaggatgcatcttcttactcttcatctgctgctccttctcctgggttccagcaccaaagctggagagatcattggaggcacggagtgcataccacactcccgcccctacatggcctatctggaaattgtcacttctgagaactacctgtcggcctgcagtggcttcctgataagaagaaactttgtgctgactgcagctcactgtgcgggaaggtctataacagtcctcctaggagcccataacaaaacatctaaagaagacacgtggcagaagcttgaggtggaaaagcaattccttcatccaaaatatgatgagaatttggttgtccacgacatcatgctactgaagttgaaggagaaagccaagctaaccctaggtgtgggaaccctcccactctctgccaacttcaactttatcccacccgggagaatgtgcagggcagttggctggggcagaacaaacgtgaatgagccagcctccgacacactgcaggaagtaaagatgagactccaggagccccaagcctgcaaacacttcaccagttttcgacacaattcccagctgtgtgtgggcaaccccaagaagatgcaaaatgtatacaagggagactctggaggacctctgctgtgtgctgggatagcccaaggcattgcatcctatgtacatcggaatgcaaagccccctgctgtctttaccagaatctcccattacaggccctggatcaataagatcttgagggagaattaactctggagcttttgccagcctgtgaggaaatctggaactggaatagtgcaggttttgtgtgccatgcgatctggcctgtctgtagttcctgctgaagccctgcctggtccctgagcttccagaaggttcttacaagtcacagaatgttcctaaaagccaccatcttcattaacctcaataaagacccagattgtcaactgcaaaaaaaaaaaa

SEQ ID NO: 35 - DNA, 1072 bp, Mus musculus
aagtctcacttccgccggacgctgtttggagaaggatggaggaggagcggagactgcgggggaggctgagccgtcggaggccgcccgcggggggcgggccccctaactgccgcccttggtttctctcggagggaagtaagagtgagccctgggctgctctgttgcgcagcaccgtgagcgggaccgcggattggaccccgaaccgtcagccattaccaccgctgcctgcttttcccagccaggagtctctacctgacccagagtccactgtgcctcctgaggccttcactgtgggatccaagactttctcctggacgcctttgccacctgcccttcgtggctctggaagctcccgccacctgttctgtgaacctgaaggctccctggggtcacctactccatccctgaaaggatgccctgcactaaattctggtcgaactcccagcgcccaggagtgtgtgcctgtgcagagtccacttgcgttgctgagttgcccgttgtgccagaaggcgtttgacccgaagctgacccagctagatgtggatagccaccttgctcagtgcttggctgagtgcaccgaagatgtggtgtggtgagcatcagggtgccttgctgtatctccttcaaacctacacaccgacattggatgtggcttctgagacatcgtcgtgtggacacctgagtattggctccttctggttttgttcatgggcattggacataatgctggtcactgacagcaggcagcactgatcctctgtggactcatcttcattgtcagcctgacaggatgtggaatcacccaggagacacatctcaggtgtgcctgtgaaaccgttcccagagattacctgggacaggaagtcccagctgaatgtgggtggcaccgtggcctggggtcccactgattgaaaagggaaaatggagaaattgagctgtttcctcactggggatgtgatgagatgcaccgctcgcctgctacggcagccatagctacttttgctactgtgccctccttgccacagggactgtaccttaactgtgagccagaataaattttaagttgctttcc

SEQ ID NO: 36 - DNA, 1661 bp, Mus musculus
gacccaagcttagatctggctttcaaaggcgtctggactcaagccagggaaggcatgagtgacggagctgcagcgaggcggtggggtaagtgtggacattcctgcagtagagagagcatcatggtggctttcaaaggagtctggactcaggctttctggaaggcagtctcagcagaatttctggccacgcttatctttgttttgctcggtgtgggatccaccataaactggggtggctcagaaaaccccttacctgtggacatggtcctcatctccctttgctttggactcagcattgctaccatggtgcagtgctttggccacatcagtggtggccacatcaatcccgctgtgactgtagccatggtgtgcacacgaaagatcagcatcgctaagtccgtcttctacatcattgcacagtgcctgggggccatcattggagccggcatcctctacctggtcacacctcccagtgtggttggaggattgggagtcaccacggttcatggaaacctcaccgctggccatgggctcctggtggagttaataatcactttccagttggtgttcactatttttgccagctgtgattccaaacgaactgatgttactggttcaatagctttagcaattggattttccgttgcaattggacatttgtttgcaatcaattatactggagccagcatgaatccagctcgatcttttggacccgcagttatcatgggaaactgggcaaaccactggatatattgggttggaccaatcatgggcgctgtgctggcaggtgccctttatgagtatgtcttctgtcctgatgtggagctcaaacgtcgccttaaggaagccttcagcaaagccgcgcagcagacaaaagggagctacatggaggtggaggacaaccggagccaagtggagacggaagacttgatcctgaagcccggagtggtgcatgtgattgacattgaccgtggagaagagaagaaggggaaagactcttcgggagaggtattgtcttccgtatgactagaggacagcactgaaggcagaagagactccctagacctggcctcagatttcctgccacccattaaggaaacacatttgttataaattagacacttgcgggtttcttgcttcacaccttgttacacagtttaaataacacatattttactattatcaatggggggggtgagaaaaagcctataatggatataaaattttaaaacagaaatctttttgaatgtatccccaaagcaactatgcaactagtgtattggcttccctttcattaataactgaaattatgaaccaagatctggtcaagttttgccgtgcagagcatatggacacctctgtgaggaagctggcattgtccatcgtcttgactattgacttcattggattgatttaaaaatgacaaaatgcagtatgtcacagaatcatgtgcattcaggagaagacatgcagtaacttcttccacgagctattccttatttataaactacctcggagggggaaaacattagcaagggccattgctaatacatcatttgtatttatatatctgactgtcagaacctaactctaattcactataatcctctccccctcagaatccaagaacccatagggctaaaagtaaaaaaaaaaaaaaa

SEQ ID NO: 37 - DNA, 1091 bp, Mus musculus
ggcacgagcctcgccagccagccgccagcagcctgcagcctgcacccgctcagccccgcacagccatgtttcagccagctgggcacggccaggactgggccatggagggcccgcgggatggcctcaagaaggagcgcttggtggacgatcgccacgacagcggcctggactccatgaaggacgaggagtacgagcaaatggtgaaggagctgcgggagatccgcctgcagccgcaggaggcgccgctggccgccgagccctggaagcagcagctcacggaggacggagactcgttcctgcacttggcaatcatccacgaagagaagccgctgaccatggaagtcattggtcaggtgaagggagacctggccttcctcaacttccagaacaacctgcagcagactccactccacttggctgtgatcaccaaccagccaggaattgctgaggcacttctgaaagctggctgtgatcctgagctccgagactttcgaggaaatacccctctacatcttgcctgtgagcagggctgcctggccagtgtagcagtcttgacgcagacctgcacaccccagcatctccactccgtcctgcaggccaccaactacaatggccacacgtgtctgcacctagcctctactcacggctacctggccatcgtggagcacttggtgactttgggtgctgatgtcaacgctcaggagccctgcaatggccggacagccctccaccttgcggtggacctgcagaatcctgacctggtttcgctcttgttgaaatgtggggctgatgtcaacagggtaacctaccaaggctactccccctaccagcttacctggggccgcccaagtacccggatacagcagcagctgggccagctgaccctggaaaatctccagatgctacccgagagcgaggatgaggagagctatgacacggagtcagaattcacagaggatgagctgccctatgatgactgtgtgtttggaggccagcgtctgacattataagtggaaagtggcaaaaaagaatgtggacttgtatatttgtacaaatagagttttatttttctaaaaaaaaaaaaaaaaaaa

SEQ ID NO: 38 - DNA, 977 bp, Mus musculus
gagctgtgctttcgctttcccttcccgctgcccaccccaggttcctcgtgcggcgctcaccaccaccccccggctctggccatggccacactgagggtccatcccgaagcccaagccaaggtggatgtgttccgtgaagacctgtgtagcaagacagagaacctgcttgggagctattttcccaagaaaatctcagagttggatgcgttcttaaaggagccagctctcaatgaagccaacctgagcaatctgaaggctccattggacatcccagtacccgatccagtcaaagagaaagagaaggaggagcggaagaagcaacaggagaaggaagagaaggaagagaagaagaaaggggacgaagacgacaaaggtcccccctgtggcccagtgaactgcaatgagaagattgtggtcctcctgcaacgcctaaaacctgagatcaaggatgtcactgagcaactcaatctggtcactacctggttgcagctacagatacctcggatagaggatgggaataattttggcgtggctgtccaggaaaaggtgtttgagctgatgaccaaccttcacaccaagctggaaggcttccacacgcagatctccaagtacttctccgagaggggtgacgccgtggccaaagcagccaagcagccccacgtgggtgactatcggcagctggtgcacgagctggacgaggcggagtaccaggagatccgtctgatggtcatggagatccgaaatgcttatgctgtgttatatgacatcatcctgaagaactttgagaagctcaagaagccccgtggagaaaccaagggaatgatctattgagccccctctctcattctgtgatgggtatagcagaaaccttcctgcttttcaccaggaactctagactggacgcagtcttcttcctactggctggggtttctccctcactctgcctcccaaacacaataaatacatagttgcccacc

SEQ ID NO: 39 - DNA, 584 bp, Mus musculus
agtgcagagagccagacgggaggaaggccagcccagcaccagcaccagccaactctcactgaagccagctctctcttcctccaccaccatgcaggtccctgtcatgcttctgggcctgctgttcacagttgccggctggagcatccacgtgttggctcagccagatgcagttaacgccccactcacctgctgctactcattcaccagcaagatgatcccaatgagtaggctggagagctacaagaggatcaccagcagcaggtgtcccaaagaagctgtagtttttgtcaccaagctcaagagagaggtctgtgctgaccccaagaaggaatgggtccagacatacattaaaaacctggatcggaaccaaatgagatcagaacctacaactttatttaaaactgcatctgccctaaggtcttcagcacctttgaatgtgaagttgacccgtaaatctgaagctaatgcatccactaccttttccacaaccacctcaagcacttctgtaggagtgaccagtgtgacagtgaactagtgtgactcggactgtgatgccttaattaatattaaacttatttaactta

SEQ ID NO: 40 - DNA, 3419 bp, Mus musculus
gagcgagcgagcgagtggactgggcgcttcgctgcgggctgttggccgcgcgggctgctgggccgcgcaccttcctgctcttcggctcaggcgcccttggacatggtggcccccggctcggtgggcagccggctgggcgcggtgttcccgttcctgctggtcctggtggacctgcagtacgaaggcgctgagtgtggagtaaatgcggatgtggagaagcatcttgaattggggaagaaattactcgcagccggacagctagccgacgccttatcacagtttcacgctgcagttgatggtgaccccgataactatatcgcatactataggagagcgaccgtcttcttagccatggggaaatccaaagcagccctgcccgacctcaccaaagtgattgcgctgaagatggactttactgccgcaagactacagagaggtcacctactgctcaaacaagggaagcttgacgaagcagaagacgatttcaagaaagtgctcaaatctaaccccagtgagcaggaggagaaggaagccgagtctcagcttgtaaaagctgacgagatgcagcggctgcgctcccaagcgctcgacgcctttgacggtgccgattacactgctgctataaccttccttgataagattttagaggtttgtgtttgggatgcagaattgcgtgaactgcgagcagaatgcttcataaaggaaggagagcccaggaaagccatcagcgacttaaaggctgcttcaaagctgaagagtgacaacacagaggcgttttacaaaatcagcacactctactaccagctaggagaccatgagctgtctctcagtgaagttcgtgaatgtctgaaacttgaccaggatcacaagcggtgttttgcacactataagcaagtgaagaaacttaacaagctgattgagtcagctgaagagctgatccgagatggcagatacacagatgcaaccagcaaatatgaatcagtcatgaaaacagagcccagtgttgctgagtacacagtgcgctcgaaggagaggatctgccactgcttctctaaggatgagaagcccgtggaagccattaggatatgttctgaagttttacagatggagcccgacaatgtgaatgctctgaaagaccgagccgaggcctacttaatagaggaaatgtacgatgaagccattcaggattatgaagctgctcaggagcacaatgaaaatgaccagcagattcgggaaggcttagagaaagcccagcggttactgaagcagtcacagaaacgagattattataaaatcttgggagtaaaaagaaatgccaaaaaacaagaaatcattaaagcataccgaaagttagcactgcagtggcatccagataatttccagaatgaagaagaaaagaaaaaagcagagaaaaagttcattgacatagcagctgctaaagaagtcctctcagacccagaaatgagaaagaagtttgatgatggagaagatcctcttgatgcagagagtcaacaaggaggtggtggcaaccccttccaccgaagttggaactcatggcaagggtttaaccccttcagctcaggcggaccgttcagatttaagttccacttcaattaaaccagctattttactgctcctcttctttattattatttttaacattaaaaacaaattttgtttgggattctaatggaaacaaaatggaacaaatcttttagtttgtccatgaccaaagagttgttttaaagaaaaaaagctgagcttattgtagacttaaggttgatgggcctgtcaaggtgggaagcaaggagctaaccgtatttctgacgaagcagcctatactaatttgtgacttctgggagaagtggtctgagatacttatcctgtggaggtgttcagaaaagcgttaaatagacattgataaccctggagcagacagattctatgcaggctgtgtattaaccgtgaggaggagctgtgatctttggtggattgtgtctcagtattcttaaaggagtgtggacagctgagcttcatttttggaggaacagttatgcttagactttggtcagtccattcacttgcaagtatttctgtaccagtgtcctcagctctcactgcaggaggggagagaccgtcttccaggaaacttaccagcaggtggtaggctgtatgtccaggtatagactggaagtatttttgttgttgttttatatctataggagaataccaatttcacttgaatttaattgttaaactaaacagagtaagttaaagtatatgaaagtggctctgtggttctctagacaacacggttgaaagtcagtttgaaatgctttttaagaaagtgaagttccaagttgtttggtcgaaattccctgtcacaaaattggttagaagtggaaagttgctctgtcaacatgggcagagcattatggttgcctctcgcaagcagtgcgctgaggcagcgtctccttctctcacacatttgtccagctgtctctgttgttttccttgctgggttttggactggctgttccctggctgtttcttctgtgagaagaaagtagaggcttgcaaatcgattcaactctggctgtgtaccttctatcattcacttaataagatggcacttcctcctgagacattcccgtccctcttactttaaagcagatacttaagaaatgtactagtcagtatttgtatactgtataatttttgccttaaaaatctgttgctaaacaagaatattgaatacttatggaactactgatgctgtgttgaaaacttagaagaattactctggtaagaattattgcctctattctagaaaaaaaaattttaaacattgtgagatattttaagcataaaggtctaatatattgcttttatgaaattaaacattttagttaattgtgggaaggaagcatgaatgtagcagccaagtacaaatcattttgttaacctatagtcatatcaacttgagcagatatagaaaaagattttgttaactgcaagaacatgaattacataagttgagttgggcaaaacattttaagtgctttttgcctctacttaggagcctttttcttaccaaaacacttaacaatgcatttcaaaatacctttcagctttcattttgcttcagtgtctcacagttcaaggcaggcaagaaaactcacagcttttatcctagctgtagagacaggcagaggcaggtggattcctaagagtttgagccagcttggtttacatagtgagttccgtgccagggcctccaccaaaatattaaatcaattcaagccagtgtgaaacattgaatgaaaaataaaagaacatttttgtgtgtttttcagatcttaaaaaaaaaaaaaaaaaaaaaaaaaaaaaaaaaaaaaaaaaaaaaaaaaaaaaaaaaa

SEQ ID NO: 41 - DNA, 4428 bp, Mus musculus
gaaaagtggcgagctgcgacgtgactggtcggtcgtgtaggtgcagcagccaaggagcccggcggcgggcaggggacacgagcgggacccccccggctccgaggaactgcggcccgcgccgccgcgtcacgcatactccgggcgccgcgagacacacataacgatactagatttgcgctgcatcttggaattcatctacacttaaaatgccacctgcgattggagggccagtgggatacacccccccagatggaggctgggggtgggcagtgttagtcggagccttcatttctattggcttctcctatgcatttcccaaatccatcactgtcttctttaaagagatagaagttatattcagtgcaacgaccagtgaagtatcatggatatcatctataatgttggctgtcatgtatgctggaggtcctatcagcagtatcttggtgaataaatacggcagccgtccagtaatgatcgctggtggttgtctgtctggttgcggcttgatcgcagcttctttctgtaacacagtacaggaactttacttgtgcattggtgttattggaggtcttgggcttgctttcaacttgaacccagctctgactatgattggcaagtatttctacaagaagcgaccactggccaacggactggccatggcaggcagccctgtgttcctctctaccctggctccacttaatcaggctttctttgatatttttgactggagaggaagcttcctaattcttgggggcctcctcctaaattgttgtgtagctggatccctgatgagaccaatagggcctgagcaagtcaagctagaaaaactcaagtccaaagaatctctacaggaagctggaaaatctgatgcaaatacagatctcattggaggaagtcccaaaggagaaaagctgtccgtcttccaaacaattaacaaattcctggacttgtcgctgtttacccataggggctttttactgtacctgtctggaaatgtggtcatgttttttggactctttacccctttggtctttcttagtagttatggtaagagtaaggatttttccagtgagaaatcagccttccttctttccattttggcttttgttgatatggtagccagaccgtccatgggacttgcagccaacaccaagtggatcagacctcggatccagtacttttttgctgcttctgttgttgcaaatggagtgtgccatttgcttgcccctttgtctacaacctacgttgggttctgtgtctacgccggagtctttggatttgcctttggttggctcagctctgtattatttgaaacattgatggacctcattggaccccagaggttctccagtgctgtgggcttggtgaccattgtggaatgctgccctgtcctcctagggccaccacttttaggccgcctcaatgacatgtatggagactacaaatacacgtactgggcttgtggcgtgatcctcatcatcgcgggtatctatctcttcattggcatgggcatcaactatcgacttcttgccaaagaacagaaagcggaggagaagcagaaaagggaaggaaaagaggacgaggccagcaccgatgtcgacgagaagccaaaggagacgatgaaagctgcacagtcgccgcagcagcacagctccggggaccccacagaggaggagagccctgtctgacctgtgaagcctggagagagcagcgtgtgacccacgacatccaaaaccatcctgctggcctctagtctaccagtggtgctcagtgcagacagtggacatttgtgtggaaaacctaccgggtgttcattggtgggattttttttttcactccttaccaatgcctgaatttaaaatatactatgctttaggtagggagtggttggcaaaggatatgggaaagaagtagtgattttctttttgtttgtttgttttgttttaatcttagcttttaacagtgtcatgaagattataatatgtgccttaagttttagtttttagaactctttagagagccttaacttttaaaaccattctgctgaattcatttgttttaaatgtcattttaaaaggaaaaataacaactagcttgcttgaggtaactaaccttaatcttgttttgttgttgtttgtaatgctttgtcagacattgttactggaacatttatgaatagaggtattggttaaaagtcgcaggtttataaaatactgactaaagtatttttctagcattatagttgcctggcatatccacctgctaggtatatatttaagaaatttgaaacataaaattttgggaacatcttggcagttccagccacagcctgtcacctgctgggcacttctcaaatgcttactacagcctcgtgctgaagtgttatcactaaactgtcacctttgctcctattcagagacactgaaatcaactgcaaaaggttagtattaacatctacaaaacaactctttaacacgtctgatttaatgtatgcagtatttcaagcagcagctgaattcagtgtaggtttccccaaaccttagttacggtatgagaatcttaggtatgtgtgggtttgaggggctctgaggtgttggttcttaggtttgaacccagggccacaagcatgctaagtgcatgctgtaccactgagccacaacccacaggcaccctggaatccttctccttgacccctgaaaccttttctcttggtttttgatagttccatttataccactactagtttagagctgtatgtgggatgattcagtaccgactgaatggatgtgcttttgttttttttacattgtttttcagtatttgcaaaaccacgagggttagagtttggcctcagggaagccaataaagataaaatgggaggaagtttgctgagaacttgtatcatgctttacgattatttgacatagtcttacctccacaccttaactttcatgaccctttcactcacctgaaatgtagaaaaatgggttcagtgtaaggataagaggaaagatggaccagattggaactacagtgttttgggttttttttttttttaacctgatgtcttctgaatagaggcagaaaaaaataagacatatgacactgaattgtactcaatgtgtttaaaataccattgtaattgacagggtgaatatagatttaaaaccttgtgtaagaagctgactttttccaaataaaacatttattttatttttagaaaacagttcttccgcatgtttatttgtgagacatgttatttttgtcttcattcttactaatttttattttattttaacctttctaatattgaatcgtccatttatataccttgactcgtacatatggttcattttatgttgattttcctcctttagttaagacaagcagggaaggattttaagaccgcatcttgagctgagatcccctgatgctgttagccttaagacactgtgggaaccaccttgcaatataaagtgttgtggtgagaatgtggtgagaatttagagaggaaaccttgaaagtttacacagacatcaactggtttggactcttatcttctgtgaagccatgtcatacttctgtgaacctttctcttctataaaaatgaaagtctctgttgatggtggaattttgagctctgtgtgtgtgcgagcgcgcgaagctgcatttgctgggcaggtgtgtctgcgctcagggttgagcccaggatttatgatacagggtcaccaacactcttcagaaaggattcttagtttataatcaaaagccaaaactgcaataaaactggaacttgctattaaactttttgttagctgcttagtcttgaggtttttcccattaaaggaacattgggtccagcaattgctctgtcactgggctaaagccacagtccataggatttacataaggtcagtgttagtgaagcctgtgtggcacttagcagaggccttctctgtcccttcctcattctctatcgtggctatcagctgtgctgtaaagcgggcctgggagcagtgggcactctgagccttgtccgtcactcctttgaatgctgattttgtctcaagtcctttcagttcacatagccgtggctgctgggtaatagatgtgagctgggcatgaactgtcacatatagcagagtgggaaaattactgaatgagtttcaaatcagtacacttaaactacactgatcaggaacgtgtccagtcaagtctgaaaattaagaacatcttcaccatctgagatgaacagtatgtacaaaattatattttgatttttttagtttataattaaatcatttttccccttttctctttcaaacccctcccatgttttccttattctcatacaaattcatggcctctttataattgttagatgtgtatatgtgttgctaaatctataaaaaacaatcttcttggtcc

SEQ ID NO: 42 - DNA, 4248 bp, Mus musculus
gagccttttttcctgcccggtactttcggttttcagcgccgagtctgtcaaagctccctggagacctccgggaccgcgcccctcagacccacttgggacactgctgagcggcgcagagagatttgcccagactcgagctcctgcgtgcagtgagtgagtgagagccagtcgtttcagctctgctccataccctgagccggcgccacgccgccgcgcatgcaactggcatataacttgctgtgtgtggtgattgcttgtgttgaatcccgaacctgcacccggagacagcccagtaagtctacgtgggaacggaagcatttggaatctcaaggatgtcacagtggttcgagcttcagcagctggactccaagttcctggagcaggtccaccagctgtacgatgacagtttccccatggaaatcagacagtacctggcccagtggctggaaaagcaagactgggagcacgctgcctatgatgtctcgtttgcgaccatccgcttccatgacctcctctcacagctggacgaccagtacagccgcttttctctggagaataatttcttgttgcagcacaacatacggaaaagcaagcgtaatctccaggataacttccaagaagatcccgtacagatgtccatgatcatctacaactgtctgaaggaagaaaggaagattttggaaaatgcccaaagatttaatcaggcccaggagggaaatattcagaacactgtgatgttagataaacagaaggagctggacagtaaagtcagaaatgtgaaggatcaagtcatgtgcatagagcaggaaatcaagaccctagaagaattacaagatgaatatgactttaaatgcaaaacctctcagaacagagaaggtgaagccaatggtgtggcgaagagcgaccaaaaacaggaacagctgctgctccacaagatgtttttaatgcttgacaataagagaaaggagataattcacaaaatcagagagttgctgaattccatcgagctcactcagaacactctgattaatgacgagctcgtggagtggaagcgaaggcagcagagcgcctgcatcgggggaccgcccaacgcctgcctggatcagctgcaaagctggttcaccattgttgcagagaccctgcagcagatccgtcagcagcttaaaaagctggaggagttggaacagaaattcacctatgagcccgaccctattacaaaaaacaagcaggtgttgtcagatcgaaccttcctcctcttccagcagctcattcggagctccttcgtggtagaacgacagccgtgcatgcccactcacccgcagaggcccctggtcttgaagactggggtacagttcactgtcaagctgagactgttggtgaaattgcaagagctgaactataacttgaaagtgaaagtctcatttgacaaagatgtgaacgagaaaaacacagttaaaggatttcggaagttcaacatcttgggtacgcacacaaaagtgatgaacatggaagaatccaccaacggaagtctggcagctgagttccgacacctgcaactgaaggaacagaaaaacgctgggaacagaactaatgaggggcctctcattgtcaccgaagaacttcactctcttagctttgaaacccagttgtgccagccaggcttggtgattgacctggagaccacctctcttcctgtcgtggtgatctccaacgtcagccagctccccagtggctgggcgtctatcctgtggtacaacatgctggtgacagagcccaggaatctctccttcttcctgaaccccccgtgcgcgtggtggtcccagctctcagaggtgttgagttggcagttttcatcagtcaccaagagaggtctgaacgcagaccagctgagcatgctgggagagaagctgctgggccctaatgctggccctgatggtcttattccatggacaaggttttgtaaggaaaatattaatgataaaaatttctccttctggccttggattgacaccatcctagagctcattaagaagcacctgctgtgcctctggaatgatgggtgcattatgggcttcatcagcaaggagcgagaacgcgctctgctcaaggaccagcagccagggacgttcctgcttagattcagtgagagctcccgggaaggggccatcacattcacatgggtggaacggtcccagaacggaggtgaacctgacttccatgccgtggagccctacacgaaaaaagaactttcagctgttactttcccagatattattcgcaactacaaagtcatggctgccgagaacataccagagaatcccctgaagtatctgtaccccaatattgacaaagaccacgcctttgggaagtattattccagaccaaaggaagcaccagaaccgatggagcttgacgaccctaagcgaactggatacatcaagactgagttgatttctgtgtctgaagtccacccttctagacttcagaccacagacaacctgcttcccatgtctccagaggagtttgatgagatgtcccggatagtgggccccgaatttgacagtgtgatgagcacagtataaacacgaatttctctctggcgacatttttttcccatctgtgattccttcctgctactgttccttcatatgcagtatttctagggaaatgcaagaaagaaagagcatcacatttgctgagcactgctggtagaaagtggatatttctctaattagaaacctgttactctgaaggacttcatgcatcttactgaaggtgaaatggaaagtcacttaacacaaaatggattttgtaaacaaagaccaagagatccacccaagcaccaggactagagtgcgagtatttggggcaaggtgaggagaacggtcactttagtaatggtctgtaatcagtgcccaagtgctgcacatcactggaaagagacatacttatgggggaggggccttcttgatggaggaatgtttctgtcccgggagacattggcacttcccctctcctggatggccggaagtcttccactgttttacatatggcacagttcaaagtcaactttagatccaatgctctatcaaactatagtgggcatccttcatgtgagtgggaagaaaacaaccgtgctccttactgcagcttctgccaaggcatggttgctctcctcagggactagctttgttggtggcaatggctacacaaaactaaacaccaacagaagtaagaccattttcatgagtactccatcaagttaaagggtttttgttgtctttttggtcatggattgaataaaattgtctttgcacatccattaagggggccagctttcttaaagcaatttttctttttttttaactaaaattagatataggtgaactcatgttttttagtgggctgaacttatcggttttagctggttgtcttaattagccataaacttggagaaagcagtgacttcttgaatccttagccaaatatgagtatcagataattttattatttttttttcgagacagggtttctctgtgtagccctggctattctggaactcactctgtagatcaggctggcctggaactcagaaatccgcctgtctctgcctcccgagtgctgggattaaaggtgtgcaccaccaatgcctggtgagataactttaaagaactccctataaatgcatgagaaccactgttactgatgaatgtggttttttgacaactacattcacaaatggcctgtcttgtgttttgtcaccgttttgagggatgatgttttgtggcacgtgtgtgatcacagcctgatggttctggtcgtgggttggttcttctgggccagctttcacagactgctgcgcagctgcacctacagtgctgccccataatactgtttcactttggtgaagatcagcccaccttacaccccgagtgcaggtgtgaaccacggtaagtgtgcacagtccttagggaaaacagggacgcagaggcctgcctcctctcttttccatgccaaaatgaaatgaccaagaaacaaaacatttaaaaagttgtttctaaatgctgagacctaaccattgcttatatactgttgtctgttgaaacagtttgttacaatttcattctgttgaactaggtgagactttaagaaatgttgaaattatgttaatttcctattattatttaatataaagatatttaaaatgtctagtgttatgagttggtttaatatatatctcatgtatgt

SEQ ID NO: 43 - DNA, 1877 bp, Mus musculus
ccatcctaatacgactcactatagggctcgagcggccgcccgggcaggtgcaggtagcagtgaccctctgaggcgtttggtgctccggtaaccaccacggctgtagagcgagtgttgccatggaaccgatcagtgtgagtatatacacttctgataactactctgaagaagtggggtctggagactatgactccaacaaggaaccctgcttccgggatgaaaacgtccatttcaataggatcttcctgcccaccatctacttcatcatcttcttgactggcatagtcggcaatggattggtgatcctggtcatgggttaccagaagaagctaaggagcatgacggacaagtaccggctgcacctgtcagtggctgacctcctctttgtcatcacactccccttctgggcagttgatgccatggctgactggtactttgggaaatttttgtgtaaggctgtccatatcatctacactgtcaacctctacagcagcgttctcatcctggccttcatcagcctggaccggtacctcgccattgtccacgccaccaacagtcaaaggccaaggaaactgctggctgaaaaggcagtctatgtgggcgtctggatcccagccctcctcctgactatacctgacttcatctttgccgacgtcagccagggggacatcagtcagggggatgacaggtacatctgtgaccgcctttaccccgatagcctgtggatggtggtgtttcaattccagcatataatggtgggtctcatcctgcccggcatcgtcatcctctcctgttactgcatcatcatctctaagctgtcacactccaagggccaccagaagcgcaaggccctcaagacgacagtcatcctcatcctagctttctttgcctgctggctgccatattatgtggggatcagcatcgactccttcatccttttgggagtcatcaagcaaggatgtgacttcgagagcattgtgcacaagtggatctccatcacagaggccctcgccttcttccactgttgcctgaaccccatcctctatgccttcctcggggccaagttcaaaagctctgcccagcatgcactcaactccatgagcagaggctccagcctcaagatcctttccaaaggaaagcggggtggacactcttccgtctccacggagtcagaatcctccagttttcactccagctaacccttatgcaaagacttatataatatatatatatatatgataaagaacttttttatgttacacattttccagatataagagactgaccagtcttgtacagtttttttttttttttaattgactgttgggagtttatgttcctctagtttttgtgaggtttgacttaatttatataaatattgttttttgtttgtttcatgtgaatgagcgtctaggcaggacctgtggccaagttcttagtagctgtttatctgtgtgtaggactgtagaactgtagaggaagaaactgaacattccagaatgtgtggtaaattgaataaagctagccgtgatcctcagctgttgctgcataatctcttcattccgaggagcaccccacccccacccccacccccaccccattcttaaattgtttggttatgctgtgtgatggtttgtttggtttttttttgttgttgttgttgttttttttttctgtaaaagatggcacttaaaaccaaagcctgaaatggtggtagaaatgctggggttttttttgtttgtttgttttttcagttttcaagagtagattgacttcagtccctacaaatgtacagtcttgtattacattgttaataaaagtcaatgataaacttaaaaaaaaaaaaaaaaaaaaaaaaaaaaaaaaaaaaaaaaaaa

SEQ ID NO: 44 - DNA, 1973 bp, Mus musculus
gagattctcggacctcggcgacctccggggatccgagtttgcagacttcttgtgcgcagctagccgcctcaggtgtttgaaccatgaatcttttactccttttggctgtcctctgcttgggaacagccttagctactccaaaatttgatcaaacctttagtgcagagtggcaccagtggaagtccacacacagaagactgtatggcacgaatgaggaagagtggaggagagcgatatgggagaagaacatgagaatgatccagctacacaacggggaatacagcaacgggcagcacggcttttccatggagatgaacgccttcggtgacatgaccaatgaggaattcaggcaggtggtgaatggctaccgccaccagaagcacaagaaggggaggctttttcaggaaccgctgatgcttaagatccccaagtctgtggactggagagaaaagggttgtgtgactcctgtgaagaaccagggccagtgcgggtcttgttgggcgtttagcgcatcgggttgcctagaaggacagatgttccttaagaccggcaaactgatctcactgagtgaacagaaccttgtggactgttctcacgctcaaggcaatcagggctgtaacggaggcctgatggattttgctttccagtacattaaggaaaatggaggtctggactcggaggagtcttacccctatgaagcgaaggacggatcttgtaaatacagagccgagttcgctgtggctaatgacacagggttcgtggatatccctcagcaagagaaagccctcatgaaggctgtggcgactgtggggcctatttctgttgctatggacgcaagccatccgtctctccagttctatagttcaggcatctactatgaacccaactgtagcagcaagaacctcgaccatggggttctgttggtgggctatggctatgaaggaacagattcaaataagaataaatattggcttgtcaagaacagctggggaagtgaatggggtatggaaggctacatcaaaatagccaaagaccgggacaaccactgtggacttgccaccgcggccagctatcctgtcgtgaattgatgggtagcggtaatgaggacttatggacactatgtccaaaggaattcagcttaaaactgaccaaacccttattgagtcaaaccatggtacttgaatcattgaggatccaagtcatgatttgaattctgttgccatttttacatgggttaaatgttaccactacttaaaactcctgttataaacagctttataatattgaaaacttagtgcttaattctgagtctggaatatttgttttatataaaggttgtataaaactttctttacctcttaaaaataaattttagctcagtgtgtgtgtatgtgggacttcagtgtgtaatgtgttgacaaatgttcgggactaaatactgattcagggtgacatggtacagcaagaaaaaggtggcaggtgctctggagccttcggatttcacctcagtgtcccatcagattaggtatgtgttagtgaatctagcttgggataattgttttctttttgtgtgtgtacatggtaaatgtgtggagttcagagaacaactcagttccacagtgttggtcctatcaggtcctagccatcaaaataaggttgtcaggctgggccacaggtgccttttactactgagctatcttgccagccccactagtttttaagtgacataattacgtatgtttatactataatgtgtttttgatatgatgtgtatactacaaaatgatctgatagggctaataagcttacctcaaatatttaattactttgttgaacttttctagctgtttttaaaatacacagtatattattgttggaaactgtcctgttatgtagaccaggctggccttaagcccatgatctcccttcctcagccttctaagggctaagataaacatgtaatgttataccct

SEQ ID NO: 45 - DNA, 1635 bp, Mus musculus
cggacgcgtgggccgaggtgcgccgagtggagcgggaaacaaaggagctgagtagggagggagggaattgggccagggagaacccccggctggctgccagaagatcccgactggaggaagcccaagtgtcacttgaattccaacccagaagccagcgcctgagaccggagcaccttgtttagcaatagtggttggaacactctcttgtaagttaccggagcactagtataggaggaggatcatcgactaccctcccgccactccacggctgctggctcctagaaaccccagcttcacctctcactgggactcgagttccagaatgaaaagcaagaagggtcttgttgcagcatctggcagtgactctgaggatgaagacagcatggacagtcccctggacctttcctcatcagcagcctctggcaagagaaggaggagaggcaatctgcccaaggagtcagtccagattctgcgagactggctgtatgaacacagatacaacgcctatccctcagagcaagagaaagcactgctgtcccagcagacacacctgtccacactacaggtctgtaactggttcatcaacgcccgccgcaggctccttcctgacatgctgagaaaggatggcaaagatccaaatcagttcacgatttcccgccgtggggccaagatttcagaagctagctctattgaagctgcaatgggtatcaaaaacttcatgccaactctagaagagagcccatttcattcctgcgtagttggacccaacccaaccctagggagaccagtgtctcccaaacctccctccccaggatccattttggctcgcccgtcagtgatctgccataccactgtgactgcattgaaggatgggcctttctctctctgtcagccgattggtgtgggacagagtacagatgtaccgcaaatagcacccagcaactttacagacacctctctcgtgtacccagaggacacttgcaaatctggacccagtccaaaccctcagagtggtcttttcaacactcctccccctactccaccagacctcaaccaggattttagtggattccagcttctagtggatgttgcactcaaacgagcggcagagatggagcttcaggccaaactcacagcttaaccgttttttcaaacaaaacagttctccaaaatacggtcctgattgccgggggtgatggcaagagatgcattattttatatatttttctattaatatttgcacatgggattgctcagacgaagcttcctgttactaagatgtcttcagtggaatagagtcattccaagaactacaaactaaagctactgtagaaacaaagggttttcttttcgaatgtttcttggtagtttctcataatgtgagacggttcccagtatcatgtgatcttctcctccagactcctcctctttatgttccaagactgtgcaatactttagacgccctcgcacctctctcttcccatgtggaatgggacgcccacctacagtctaatgagtaaactttcagttttttgtttgtttgtttttttttagattcaagcaagtatgaatctagttgttggataccttttttcatgatgtaataaagtattttctttaaaaaaaaaaaaaaaa

SEQ ID NO: 46 - DNA, 1633 bp, Mus musculus
gagtcagagcatgagcacagtcactggcgatctgaaaagtgtctagagcaggatctagctgactctaagattgcagatttggtagcccagcacaatgagagctcagaggggactcatcttactcctgctgcttctggctgtgttctgttccacagctgttagcctcacatgctaccactgtttccaaccggtggtttcttcatgcaatatgaacagcacttgctctcctgaccaggattcctgtctctatgctgtagccggaatgcaagtgtatcaaaggtgttggaaacaatcagattgtcatggtgagatcattatggaccaattagaagagacaaaattaaaattcagatgctgccagtttaacttgtgtaacaaaagtgacggatccttggggaagacaccattgctggggacctcggttctggtggccattttgaatctttgtttcttaagtcatctctaagtcctagatgcctcctctctctctctctctctctctctctctcttttcctgctgctgcagtagtctaaagcttttattattttccatctgtattaatttaggaaagaataaagttcacttgaacatcttggacaagagggaggagtttaagcagtgtggaagagcaccatgcacaccaggagagcccacttgcagttgcagagtgaaggcggagggtagaacacctataggttatataatcttcctttgcctgactttaagattcaggttaagtgagttcctggcaaccctcagggatagctctctggttcctgcaatgtagctgaggagtgagatcagacctttaggagtgagtgggccaggaggattctctttaccactctgacacgctcaaaatgctttcataatcttcacaggccctgagctggtgtgtgaatgttccagttgtgagctgtcagttaggggcagtgactgttcacttgcttaaaaaaacaaaagcaaacccaaccaaccaaccaaccaaccaaccaaccagtgctggccatgaagcccagatcttggcttgtaggcgagtgctttacccttaagccccagccccagctcaagcagtgaatgaaccgctgtgctttcagctttagaaaatgtagggaaatgaaacaagctctgaaccccatgtgatggtacttgcttcctttgcttagtatctcagtactcaggaggcagaggcaggaggatggccagaaattgaaggtggtttccaggccacctaaaactatatagtaagagcttgcctcaaataaaaaaaaaaaaaaaaaaaaaaagggaaagaaaaaaaaagaaaaaaccaggtgggtgttggtgcagttttaatcccagcactcgggaagtagaagcaggcctatgctgtgaggtggaagccagccagttctaggacagccaaggacacacagagaaacccgcctctaaataaataaatggaaaagaaaaacctcagaacaaaagcaaaacaaaaaagaaaggaaacacacaaaagtctgtctgttcttatagaagtactggcggccacaacttggatgtcccacatctctgaatattgcctgggctctgctagcttttactagaaaaatgtaattaccaaaaataattaattaaagttatttgatctgg

SEQ ID NO: 47 - DNA, 1865 bp, Mus musculus
gcaacccaagatggcggatgagagtgagacagcagtgaagctgccggcaccttcgttgccactgatgatggaagggaatggaaacggccatgagcactgcagcgattgcgagaacgaggaggacaacagccacaacaggagtggcttgagtccagccaatgacaccggagccaaaaagaagaaaaagaaacaaaagaagaagaaagagaaaggcagtgacatggaatccacccaggaccagcccgtgaagatgacctctttgccagcagagaggatccaggaaatacagaaggccattgagctgttctcagtgggtcagggacccgccaaaaccatggaggaagccagtaaacggagctaccagttctgggatacacagccagtgcccaaattaggtgaagtggtaaacacccatggtccagtcgaacctgacaaagacaacattcgccaggagccctacaccctgccccagggcttcacctgggatgccttggatctgggagaccgtggtgtgctgaaagagctgtacaccctcctgaacgagaactacgtggaagatgatgacaatatgttccgattcgactattccccagagtttctcttgtgggctctccggccaccaggttggctcccacagtggcactgtggggtccgagtggtctcaagtcggaaactggttgggttcatcagtgccatcccagcaaacatccacatctatgacacagagaagaagatggtggagatcaacttcctgtgcgtccacaagaagctgcgctctaagagggtggctccagttttgatccgagagatcacccggcgggtccacctggagggcattttccaagctgtttacactgccggagtggtgttgccaaagcctgtgggcacctgcaggtactggcatcgatccctaaaccctcggaagctgattgaagtgaagttctcccacctgagcagaaatatgaccatgcagcgcaccatgaagctctaccgactgccagagactcccaagacagctggcctacgaccaatggagaagaaggacattccagtagtgcaccaactgctcagcaggtacctgaagcagtttcacctcacgcctgtcatgaaccaggaggaggtggagcactggttctacccccaggagaacatcattgacacttttgtggtagagaatgccaacggcgaggtgactgatttcctgagcttttatacacttccctccaccatcatgaaccatccaacccacaagagtctgaaagctgcgtactccttctacaacgtccacacccagacccctcttctagaccttatgagcgacgccctcgttctagccaaaatgaaagggttcgacgtattcaatgcactggatctcatggagaacaagacattcctggagaagctcaagttcggcataggggacggcaacctgcagtattacctgtacaattggaagtgcccgagcatgggggccgagaaggttgggttggtgttacagtaaccagttgccagtgagattctggataaagccactgagaattcaaaccaggaaacggaacccttccacttgttggtccaactttcacagatgtgagatctctggcaaacaaaacagaactgaaccggctttaccaaaccgccagcgaacttgacaattatattgcgatggcgtaggctgcgtgatgtcacctttagccatgtttctggtctccctattttcaatgaattaacatgctcatgcagccgtgatcaagggaatgtaactgctgaaacctagctcgtgattggcatattatggagttaacgggtgaataataaaagtatatatattatatataaaaaaaaaaaaaaaaaaaaaaaaaaaa

SEQ ID NO: 48 - DNA, 1708 bp, Mus musculus
aggagtttgagagtggaggaactgcacaccagccgccgcgggagtaggaacccgagagcgaccctgacagagtcatgtggctggaactcatcctggcttctgtgctgggctttgtcatctactggtttgtctcccgggacaaggaggagaccttaccacttgaagatgggtggtggggcccagggtcaaagccatcagccaaagaagatgagagcatccggcccttcaaggtggaaacatcagatgaggagatcaaggacttgcaccagaggatagataggttccgggcatccccacctttggagggcagtcgcttccactatggcttcaactccagctacctgaagaaagtggtgtccttctggaggaatgagtttgactggaggaagcaggtggagatcctcaaccaatacccacactttaagaccaagattgaagggctggacatccacttcatccacgtgaaacctccccagctgccctcaggccgcactccaaagcccttgctgatggtgcacggctggcctggctccttctatgagttctacaagattatcccactgctgacagaccccaagacccacggcctgagtgatgagcacgtgtttgaagtcatctgtccctcaattcctggctatggcttctcagaggcatccagcaagaaaggtttaaattcggtggccactgcgaggatcttctacaagctgatgtcacggctgggcttccagaagttctacattcaaggcggcgactgggggtctctcatctgcaccaacatagcccagatggtgcccaaccacgtgaaaggtttgcacttgaatatgtctttcatttcaagaaacatttattccctgacccctctcctgggccaacgttttgggagatttcttggctacacagagaaggatctggagctcttgtacccattcaaggaaaaggttttctacaacatcatgagggagagtggctacttacacatccaggccaccaagccggacactgtgggctgtgctctgaatgactctcctgtgggcctggctgcctacatcttagagaagttctccacctggaccaagtcagaataccgtgaactggaggatggaggcctggagaggaagttctccctggaagatctgctgactaacatcatgatctactggacgacaggaaccattgtctcctcccagcgcttctacaaggaaaacttgggccagggtgtcatggtccatagacatgaggggatgaaggtctttgtgcccactggctattcagccttcccttctgagatcctgcatgccccagaaaagtgggtgaaggtcaagtaccccaaactcatctcctattcctacatggaacgtgggggccactttgctgccttcgaagagcccaagcttctggcccaggacatccgcaagttcgtgtccctggctgagctgcagtgatgacgctacacaccaaccatggctttagcagcagccctggttccttcccagtcatacttatggaagatgtgcccttccagaggaataagtttgttccctgaccacactgggggacccagacttcaaccccacagagtcctctcttaccacccccatatgcttcgccccactgcatagctgtgttaagctacatggctttaatgataaatgggtttatttctaaaaaaaaaaaaaaaaaaaaaaaaaaaaaaaaaaaaaaaaaaaaa

SEQ ID NO: 49 - DNA, 2539 bp, Mus musculus
actggccgagacaacactgacctggacacttgggcttctgcgtgtgtgtgaggtaagcgccgcggcctgctgctaggcctgctccgagtctgcttcgtgtctcctcctgaccccgaggcccctgtcgccctcagaccagaaccgtcgtcgcgtttcggggccacagcctgttgctggactcctaagactcctgcctgactgctgagcgactggtcctcagcgccggcatgatgaagttcactgtggtggcggcggcgttgctgctgctgggcgcggtgcgggccgaggaggaggacaagaaggaggatgtgggcacggtggtcggcatcgacttggggaccacctattcctgcgtcggtgtgttcaagaacggccgcgtggagatcatagccaacgatcagggcaaccgcatcacgccgtcgtatgtggccttcactcctgaaggggagcgtctgattggcgatgcggccaagaaccaactcacgtccaaccccgagaacacggtcttcgatgccaagcgcctcatcggacgcacttggaatgacccttcggtgcagcaggacatcaagttcttgccattcaaggtggttgaaaagaaaactaaaccgtacattcaagttgatattggaggtgggcaaaccaagacatttgccccagaagaaatttctgccatggttctcactaaaatgaaggagactgctgaggcgtatttgggaaagaaggttacccatgcagttgttactgtaccagcttacttcaatgatgcccagcgacaagcaaccaaagatgctggcactattgctggactgaatgtcatgaggatcatcaatgagcctacagcagctgctattgcatatggcctggataagagagagggagagaagaacatccttgtgtttgacctgggtggcggcaccttcgatgtgtctcttctcaccattgacaatggtgtctttgaagtggtggccactaatggagatactcacctgggtggggaagactttgatcagcgggtcatggaacacttcatcaagttgtacaaaaagaaaactggtaaagatgttaggaaagacaacagagctgtgcagaaactccggcgtgaggtagaaaaggctaagagagccttgtcttctcagcatcaagcaaggattgaaattgagtccttcttcgaaggagaagacttctcagagacccttactcgggccaaatttgaagagctgaacatggacctgttccgctctaccatgaagcctgtccaggaagtgttggaagactctgatctgaagaaatctgatattgatgaaattgttctggttggtggatctactcgaattccaaagattcagcaactggtgaaagagttcttcaatggcaaggagccatcccgtggcataaaccccgatgaggctgtagcctatggtgccgctgtccaggctggtgtcctctctggtgatcaggatacaggtgatctggtactgcttgatgtttgtccccttacacttggtattgaaactgtgggaggagtcatgacaaaactgattccaaggaacactgtggtacccaccaagaagtctcagatcttctccacggcttccgataatcagccaactgtaacaatcaaggtctatgaaggtgaacgacccctaacaaaagacaatcatcttctgggtacatttgatctgactggaattcctcctgctccccgtggagttccccagattgaagtcacttttgagatagatgttaatggtattatccgagtgacagctgaagacaaaggtacaggaaacaaaaacaaaatcacaattaccaatgaccaaaaccgcctgacacctgaagaaattgaaaggatggttaatgatgctgagaagtttgctgaggaagacaaaaagctcaaagagcgcattgacaccaggaatgaattggaaagctatgcttattctctcaagaaccagattggagataaagaaaagctgggaggtaaactttcttctgaggataaagaaaccatggaaaaagctgtagaggaaaagattgaatggctggaaagccaccaggatgcggacattgaagactttaaagccaaaaagaaggaactagaagaaattgttcagccaattatcagcaaactctatggaagtggaggccctcccccaactggtgaagaggatacatcagaaaaagatgagttgtaggtgcactgatctgctagagctgtaatattgtaaatactggactcaggaactttcgttgggagaaaattgagagaacttaagtctcgaatgtaattggaatcttcacctcagagtggagttgaaaatgctatagcccaagtggctgtttactgcttttcattagcagttgctcacatgtcttggggtcagggagaggaggaattggctattttaaaaattgagaaaaaggtgggtcagggtgtgtgttcaccttggatatggtctatttaacaattgggtcatgcacatgtggtgtaggaacttttttctaccataagtgacaccaataaatgtttgttatttac

SEQ ID NO: 50 - DNA, 1890 bp, Mus musculus
gacagtcaggatccacgcatgggcgctcgaagaggtccaagtggtggctgtccctggagctagtgttgtgtgagcctgagtcgcagcagcttggagctgtcaggaggctgggccacacgctcctcccctgtccctcttgcacagcaaccggaggaggggagggtcgagcctaaaggtagattttacgaggaggctgtatgctcaacccacctctgagttattctatccccgggggtaaaaagactgtctggaagcctgccgtgctaggatctgactcgctctggtggcattgctgcgctcagggttctgggtatccgggagtcagtgcagtgaccagaacatcaaactgaagccactgctcagctcctaagatggtaccactcaaactgcaggcgcttttctgcctcctctgctgcctcccatgggtccatccttttcactggcaagacacatcttcttttgacttcaggccgtcagtaatgtttcacaagctccaatcggtgatgtctgctgccggctctggccatagtaaaatccccaaaggaaatggatcgtaccccgtcggttgtacagatctgatgttcggttatgggaatgagagcgtcttcgtgcgtttgtactacccagctcaagatcaaggtcgcctcgacactgtttggatcccaaacaaagaatattttttgggtcttagtatatttcttggaacacccagtattgtaggcaatattttacacctcttatatggttctctgacaactcctgcaagctggaattctcctttgaggactggagaaaaatacccactcattgtcttttctcatggtctcggagccttcaggacgatttattctgctattggcattggcttggcatctaatgggtttatagtggccactgtcgaacacagagacagatctgcatcggcaacttacttttttgaagaccaggtggctgcaaaagtggaaaacaggtcttggctttacctgagaaaagtaaaacaagaggagtcggaaagtgtccggaaagaacaggttcagcaaagagcaatagaatgttcccgggctctcagtgcgattcttgacattgaacatggagacccaaaagagaatgtactaggttcagcttttgacatgaaacagctgaaggatgctattgatgagactaaaatagctttgatgggacattcttttggaggagcaacagttcttcaagcccttagtgaggaccagagattcagatgtggagttgctcttgatccatggatgtatccggtgaacgaagagctgtactccagaaccctccagcctctcctctttatcaactctgccaaattccagactccaaaggacatcgcaaaaatgaaaaagttctaccagcctgacaaggaaaggaaaatgattacaatcaagggctcagtgcaccagaactttgacgactttacttttgtaactggcaaaataattggaaacaagctgacactgaaaggagaaatcgattccagagtagccatcgacctcaccaacaaagcttcgatggctttcttacaaaagcatttagggcttcagaaagactttgatcagtgggaccctctggtggaaggagatgatgagaacctgattcctgggtcaccctttgacgcagtcacccaggtcccggctcagcaacactctccaggatcacagacccagaattagaagaacttgcttgttacacagttgccttttaaaagtagagtgacatgagagagagagagagagcgcacgcgcgcgcgagcaatgtatttacccaaataagcattttttaaatatacactgtactgtaggatagtgatgaacgcctagcctaagatttttttccccctgtaaatgtaacgaatataaaatagagaat

SEQ ID NO: 51 - DNA, 2757 bp, Mus musculus
gttgctcctcccttccctactcggataggagccacaaggatctggagctccagcttccaaattgcagctggcctcgggccaggtgacctttgctttagggatcagtctgctcgaactgcaagcatgatgtgggggaccaaacttctgccggtcctgttgctgcagcatgtcctcctgcacctcctcctgcttcatgtcgccatcccctatgcagaaggacagaagaaaagaagaaatacacttcatgaatttaaaaagtcagcaaaaactactcttaccaaggaagacccattactgaagattaaaaccaaaaaagtgaactctgcagatgagtgtgccaacaggtgtatcaggaacaggggctttacgttcacttgcaaggccttcgtttttgataagtcaagaaaacgatgctactggtatcctttcaatagtatgtcaagtggagtgaaaaaagggtttggccatgaatttgacctctatgaaaacaaagactatattagaaactgcatcattggtaaaggaggcagctataaagggacggtatccatcactaagagtggcatcaaatgccagccttggaattccatgatcccccatgaacacagctttttgccttcgagctatcgcggtaaagacctacaggaaaactactgtcgaaatcctcgaggggaagaagggggaccctggtgtttcacaagcaatccagaggtacgctacgaagtctgtgacattcctcagtgttcagaagttgaatgcatgacctgcaatggtgaaagctacagaggtcccatggatcacacagaatcaggcaagacttgtcagcgctgggaccagcagacaccacaccggcacaagttcttgccagaaagatatcccgacaagggctttgatgataattattgccgcaatcctgatggcaagccgaggccatggtgctacactcttgaccctgacaccacttgggagtattgtgcaattaaaacgtgcgctcacagtgctgtgaatgagactgatgtccctatggaaacaactgaatgcattcaaggccaaggagaaggttacaggggaaccagcaataccatttggaatggaattccctgtcagcgttgggattcgcagtaccctcacaagcatgatatcactcccgagaacttcaaatgcaaggaccttagagaaaattattgccgcaatccagatggggctgaatcaccatggtgttttaccactgacccaaacatccgagttggctactgctctcagattcccaagtgtgacgtgtcaagtggacaagattgttatcgtggcaatgggaaaaattacatgggcaacttatccaaaacaaggtctggacttacatgttccatgtgggacaagaatatggaggatttacaccgtcatatcttctgggagccagatgctagcaaattgaataagaattactgccggaatcctgatgatgatgcccatggaccttggtgctacacggggaatcctcttattccttgggattattgccctatttcccgttgtgaaggagatactacacctacaattgtcaatttggaccatcctgtaatatcctgtgccaaaacaaaacaactgcgggttgtaaatggcattccaacacaaacaacagtagggtggatggttagtttgaaatacagaaataaacatatctgtggaggatcattgataaaggaaagttgggttattactgcaagacaatgttttccagccagaaacaaagacttgaaagactatgaagcttggcttggcatccacgatgttcatgagagaggcgaggagaagcgcaagcagatcttaaacatttcccagctggtctatggtcctgaaggctcagacttggttttactgaagcttgctcgacctgcaatcctggataactttgtcagtacaattgatttacctagttatggttgtacaatccctgaaaagaccacttgcagtatttacggctggggctacactggattgatcaacgcggatggtttattacgagtagctcatctgtatattatggggaatgagaaatgcagtcagcaccatcaaggcaaggtgactttgaatgagtctgagttatgtgctggggctgaaaagattggatcaggaccatgtgagggagattatggtggcccactcatttgtgaacaacacaaaatgagaatggttcttggtgtcattgttcctggtcgtggatgtgccatcccaaatcgtcctgttatttttgttcgagtagcatattatgcaaaatggatacacaaagtaattttgacatacaagttgtaatagccatagaagaggccagtgtgtttgaagcatccatggatacatgaggatttccaagacttcaggatcaaaatgtcacctaaaacaatcctagaacaactacttgagtgttgtgagtgttcagatactcattaatatatatgggtgttttctgttgtattgtttgtcagtgtcctttgtaaatgttcaagtgaattaaggtacctgcaagtgcagtaacatatctcctgaagatacttgaatgaattaaaaaaatataaatttagagttggctagatgctaaagttttaaagaaaaaggttaattaatcactctatgctgctttccaggttaatatcttagtgatgaataaattgtatgttaaacattattttaaccccaccaaaacaatttatacattgtttttaaattgtaagtctatattaaattatattacatttcatatgc

SEQ ID NO: 52 - DNA, 2744 bp, Mus musculus
agcggacgagcgccgggtggctgaagccccgcgccacgatcgcccgccgacgccgcccacactctgctcttctgcgacgcctgccaccttcccttccttccctgagcccctccgccctggctagctggcccgggttctctagccttcggagtcccgaggtcacggatcctctccctagtcccttgggtcccgcgcccattccacgcctttttcctcgtaccgcaccccggctgggcgcctggcaccggggaccgttgcctgactcgaggcccagctccacttttcgcgcgcgtctcctcctcctgccctcctcctcctcctcctccttcactaccaacttcaactccccggttctcgctccgctcgtgagtgttcactccgcgcctctccgcccgctccgcagcgctgctttccatcgggtctcattctgtcccctaaaggtgggagcgcgtccgttagggtccgcaccatggcacgcttaggcttgctcgcgctcctctgcaccctggccgcgctcagcgcctcgctgctggctgcggagctcaagtcgaaaagttgctcggaagtgcgacgtctctacgtgtccaaaggcttcaacaagaatgatgcccccctctatgagatcaacggtgaccatttgaagatctgtccccaggattatacatgctgttctcaagagatggaagagaagtacagcctgcaaagtaaagatgatttcaaaaccgtggtcagcgaacagtgcaaccatttgcaagccatctttgcatcccgttacaagaagtttgatgaattcttcaaagaacttcttgaaaatgcagagaaatccctgaatgatatgttcgtgaagacatatggccacttatacatgcaaaattcagagctatttaaagatctcttcgttgagttgaagcgctactatgtggcgggaaatgtgaacctggaagaaatgttaaatgacttctgggctcgccttctggagcgcatgtttcgcctggtgaactcccagtaccattttacagatgagtacttggaatgtgtgagcaaatatacagagcagctgaagccttttggagatgtccctcggaaactgaagctccaggttacccgcgcatttgttgcagccaggaccttcgctcaaggcttagcagttgcaagggatgtagtaagcaaagtgtccgtggtgaaccccacagctcagtgcacccatgcactgctgaagatgatctactgctcccactgccggggcctggtgactgtgaagccctgttacaactattgctcaaacatcatgcgaggctgtttggccaaccaaggagaccttgattttgagtggaacaatttcatagatgctatgctgatggtggcagagaggctggagggtcctttcaacattgagtccgttatggatcccatcgatgtgaagatttctgatgctatcatgaatatgcaggataatagtgttcaagtgtctcagaaggttttccaaggctgtggccctccgaagcctctcccagctggacgaatttctcgctccatctctgaaagtgccttcagtgctcgattcagaccttatcatccagagcaacgcccaaccacggcagctggcactagtttggaccgactggttactgatgtcaaggagaaactgaaacaagctaagaagttctggtcctctctcccaagcaccgtttgcaatgatgagaggatggcagcaggaaatgaaaatgaggatgactgctggaatggcaaaggcaaaagcaggtacctgtttgcagtgacaggaaatggattggccaaccagggcaacaacccagaagtccaggttgacaccagcaagccagacatactgatccttcgtcagatcatggcccttcgggttatgaccagtaaaatgaagaatgcttacaatggaaatgacgtggacttctttgacatcagtgatgagagtagtggagagggaagtggaagcggatgtgaatatcagcagtgcccttcggagttcgagtacaacgccactgaccattctgggaagagtgccaacgagaaagctgacagtgccggtggtgcccatgcagagacaaagccctacctcctcgctgctctctgcatcctgtttctcgctgtgcagggagagtggagataattgtcaaactctgagtaaaagcgttcatcatcagaaagttcaaaggcaccaagttctcactttttttttttttaaccatcctagtgactttgctttttaaatgaatggacaacaatgtacagtttttactgtgtggccactggtttaagcaatgttgactttgttttgctcattcagtttgaggggacagcggggcctcctgcctttaagtttgttcctccccctcacctcccccctcctttgagactcgtgttctgcgtggctagcagtgtaggtacagaactgtagttagttgtgcattggtgatcttgttttctttgttggcttctctcattttatttgtggggtttttcttttccaattatggtctcaccttgtttctcacaagaaaaccagggtcctttcttggcatgtaacatgtacgtatttctgaaatattaaatagctgtacagaagcaggtttatttatcatgttatcttattaaaagaaaaagcccaaacaagctggaaaatttccatttatccctgttattttagctgccttattgggagagaagtggagttgactttgggttttcttcctttctttctttctctctct

SEQ ID NO: 53 - DNA, 1750 bp, Mus musculus
gtcgaccgctgtcttgcaaacccgtctctgcgatctctgcagcagttctgagccggggccgccggtcccccgaggcttccccagtcccggggtctctgtgccgggacgctgctatggacgacattttcactcagtgccgggagggcaacgcggtggcggtgcgcttgtggctggacaacacagaaaacgacctcaatcagggggatgatcatggcttctcccccttgcactgggcctgccgagaaggccgctctgcggtggttgaaatgctgatcatgcgtggagcacggattaatgtgatgaatcgtggggatgatacccccctgcacctggcagctagtcatggacaccgtgacattgtacagaagctgttgcaatacaaggctgacaccaatgcagtgaatgagcacggcaatgtgccacttcactatgcatgtttctggggccaagaccaggtggcagaggacctggtggctaacggggctcttgtgagcatctgtaacaagtatggagagatgcctgtggacaaagccaaggcaccccttagagagcttctccgagaacgggcagagaaaatgggccagaatctcaaccgtattccatacaaggacacattctggaaggggaccactcgcacaaggccccgaaatgggaccctgaacaaacactccggtattgacttcaaacagctcaactttctggcaaagctcaatgagaatcattctggagagctttggaaaggccgctggcagggcaatgatattgttgtgaaggtgctgaaggttcgtgactggagtacaaggaaaagcagggacttcaatgaggaatgtccccggctcaggattttctcacaccctaacgtgctcccagtgctaggtgcttgccaggctcccccagccccccacccaaccctcatcacacactggatgccatatggatctctctacaatgttctacatgaaggcaccaatttcgttgtggaccagagccaagctgtaaagtttgctttggacatggcaagaggcatggcttttcttcacacactagagcctctcataccccggcatgcactcaatagccgcagtgtaatgatcgatgaagatatgactgcccgaatcagcatggctgatgttaagttttctttccagtgccctgggcgcatgtatgcgcctgcctgggtggcccctgaagccctgcagaagaagcctgaagacacaaacagacgctcagcagacatgtggagtttcgcggtgcttctgtgggaactggtgacacgagaggtgccctttgctgacctctctaatatggagattgggatgaaggtggcactggaaggccttcggcctaccgtcccaccaggtatttccccccatgtgtgtaagctcatgaagatttgcatgaatgaagaccctgcaaagcgacccaagtttgacatgattgtgcctatcttggagaagatgcaggacaagtaggaccttcaggtccttgcccaaactccagaagtgtcaaaacatggctgggggagtacacttctccaaagttaaagacctctggttgcctcccctgtctctaatcatggtactaccccagttatgggacttgttccctgctcccatccctaccactgtagccccaaaaggggctgggctcagagctttgtcacttgccacatgatgtctcccaacatgggagggatcagccccgcctgtcacaataaagtttattatgaaaaaaaaaaaaaaaaaaaaaa

SEQ ID NO: 54 - DNA, 4792 bp, Mus musculus
ctccacacgcctggacagacgtccgcgcccgttcccctgtgaggccgaggaccggcaaggctccggagcaggtcgccaggcgggtaatcagaccaatggctttctctgtggtccttcatccagccttcctcctggcagtgctgtccctgagggcatcccgaagcgaagtcttggaggagcctttaccattgactcctgagatacataaagtttcttttcaattgaaacttcaagaagtgaatttagaatggactgtcccagcccttactcatgaagaattaaacatgatatttcagatagagatcagtagactgaacatatccaacaccatctgggtggagaattatagcaccactgtgaagcgtgaagaagctgtgcgttggaactggacgtctgatatccctttggagtgtgtcaaacatttcataagaatcagggctctggtagatgacaccaagtcccttccacagagttcctggggcaactggagttcctggaaagaagttaatgcaaaggtttccgttgaacctgataaatcattaatatttcctaaagacaaagtgttggaagaaggctccaatgtcaccatctgtctgatgtatgggcagaatgtatataatgtatcctgtaagttgcaagatgagccaatccatggagaacaacttgattcccacgtgtcattattaaaattgaacaatgtagttttccttagtgacacagggacaaacatcaattgtcaagccacgaagggtcctaaaagaatatttggtactgttctctttgtctcgaaagtgctcgaggaacctaagaatgtttcctgtgaaacccgagactttaagactttggactgttcatgggaacctggggtagatacgactttgacttggcgtaaacaaagattccaaaactacactttatgtgaatcgttctctaagagatgtgaggtttctaactacaggaactcctatacctggcaaatcactgaaggctcacaggaaatgtataactttactctcacagctgaaaaccaactaaggaaaagaagtgtcaacattaattttaacctgacccatagagttcatccaaaggctccgcaggacgtcacccttaaaattataggtgctacaaaagccaacatgacttggaaggttcactcccatggaaacaactacacacttttgtgtcaggttaaactccaatatggagaagtgattcatgagcacaatgtttctgtccacatgagcgcaaactacctcttcagtgatctggatccagacacaaagtacaaggcttttgtgcgctgtgcaagtgccaaccacttctggaaatggagcgactggacccaaaaagagttcagcacacccgagactgctccctcacaggctcttgatgtatggagacaagtgtggtcggagaatggaagacgcattgtgactttattctggaagccactattaaaatcacaggccaatggcaaaatcatatcctataatatagttgtagaaaatgaagccaaaccaactgagtcagaacactactgtgtctgggcaccagccctcagcacaaacctgagccttgacctgcaaccttacaagattcgcatcacaaccaacaacagcatgggggcatctcctgagtccttgatggtcctttctaatgattctggacacgaagaggtcaaggaaaagacaattaaaggtataaaggatgcattcaatatttcttgggagcccgtatctggagacacgatgggctatgttgtggactggtgtgcacattcccaggaccaacgctgtgatttgcagtggaagaaccttggtcccaataccacaagcaccaccatcacctcagatgattttaaaccaggcgtccgttacaacttcagaatttttgaaaggtctgtggaacacaaagctcggttagtagagaaacaaagaggatacacccaggaactggctcctttggtgaatccaaaagtggagattccttactcgacccctaactccttcgttctaagatggccagattatgacagcgacttccaggctggttttataaaagggtacctcgtgtatgtgaaatccaaggagatgcagtgcaaccaaccctgggaaaggaccctccttccagataattcagtcctctgtaaatacgacatcaatggctcagagacaaagacactcaccgtggaaaaccttcagccagagtccctctatgagtttttcgtcactccgtacaccagcgctggcccaggacccaatgaaacgttcacaaaggtcacaactccagatgcacgctcccacatgctgctgcagatcatactacccatgaccctctgcgtcttgctcagcatcattgtctgctactggaaaagtcagtgggtgaaggagaagtgctaccctgacattcccaatccgtacaagagcagcattctgtcactcataaaatccaagaagaatcctcacttaataatgaatgtcaaagactgcattccagatgtccttgaagtgataaacaaagcagaaggcagcaagacacagtgtgtaggctctgggaaacttcacattgaagatgtacccactaagccgccaatcgtgccaacagaaaaggattcctcagggcctgtgccctgcatcttctttgagaattttacttacgatcagtcagcttttgactctggttcccatggcctcattccaggtcccctaaaagacacagcacaccaacttggactattggctccacctaacaagttccagaacgtattaaaaaatgactacatgaagcccctggtcgaaagtccaactgaagaaactagcttgatttatgtgtcacagctggcttcacccatgtgcggagacaaggacacgcttgccacagaaccacccgtgccagtgcatggttcagagtataaaaggcaaatggtagttcccgggagcctcgcatcaccttctctgaaggaggataacagcttgacctcaacggtcctcttaggccaaggtgaacagtaaacaccacgcagcacaaataaatgcactccacacactataggcactttgggagatgtagctgttaccatgccaacaccacgtgccctggttggttccaggggtgggggttaggggagactcattatctgcagtgctgatttatcaacgatcactacagaccaacagacttaaggaccatataatatggtgttcaccctgaaggcgttccctagaaatggcagatccgagagcatgctgaccttgctattatttggtccaggctcacccttattgcagtagcttgacatagggtgtacaccagtcatttcgcagagcctacctactcaaaactacacaccgaggctgtggtcctaggattttgatttgcagcgagaaagcatcttcttgtaaacttaacctcacacttaaaagtttaagggtaaaacaagtgggtcagaagttttgattagcaccgcaagagattgcttactttgattgtgcagatttatcacatttaatggaaaggctacaaactaggttttggccataccttgaaatgagaacttgtggtcactgataaagcagaaagaactctcttcgtgtctacaccttatgtaactaaccagtaagatgtgcaaatggacaggagactcttcatgcgtctcctgcagtcaaacaggattgcaaggagctccagacctgctgcccaggcgactgcatcctgtccaacagactccagtcttcctctttagtttttgactacctcagaacaggaaaaaaaggacatttcattgagtgatgccttttacatataatatacaccacctcccgcccctgcccccaccccaagctgtatctagatgacctatttcacgagctgatctctgctttttgcacgcttagttgtctggttcaagaaaattctgtctcacattcctattgtgctaaaatactatagccccagaactgggtataatttaaactgtagaagtcagttgtgaaggacccaaagcatgtcttttgacaaaaatctacttggtcctatctgtgggtttcacatcaagattcaaccaatttcagaaagaagatattctggaaaaaaaaattgtctgtactaaattcatagatttttcttgttattccgtaaataaggtattaacaatttccatagcacttacacgcaccaggtattaggccacagcatggaggagtactcactgtatacaatgctatttttaggttaaggcctaaacttctgaagatcttggtaacagcagagctcctgtaatcaactcctggaatgtgccatagaggaatgactatatgtaacagctgaacacttacaccggttccttcctcttaatgcttgtcacattgcagaccaaggtggagaggttctccttttgttgttagctacgtgtggtagcagtgatgactttgtgcgcatgtgcagctgttaagtgctatagcatgtgctacagggtgtggccatagaacatagtaacagcaaccacgaatgttcaacacaagctgtccaatcttctctttacgtaataccaagcctttgctagaaagcatggctacaacctaagctaggatcagccagtatcttgagtagtttaggtgggagaagactttgctcactattgcagatgctctgtttacattttcttgtcaatggacttctcactggaaacttgcacccagaaatgttaatgacattgatttgtgattttgtttttcatttcaattttggttaaaaaataatccataaaacatttctgctgtttcaataaagcccg

SEQ ID NO: 55 - DNA, 4112 bp, Mus musculus
ccgccctggacaaccgaagcggcgcagaccaggatggctgcccaagtgacactagaggacgcactgtccaatgtggacctcctggaggagctgcctctgcctgaccagcagccctgcatcgagcccccaccgtcctcgctgctctatcagccaaatttcaacaccaactttgaagacagaaatgcatttgtcactggcattgcaagatacatcgaacaagcaactgtccactctagcatgaacgagatgctagaggaaggccaagagtatgctgtcatgctgtacacctggaggagctgctcccgggccatccctcaggtgaagtgcaacgagcagccgaatagagttgaaatttatgagaaaaccgtggaagtccttgaacccgaggtcacaaaactgatgaattttatgtactttcagagaaatgccatcgagcggttctgtggggaagtgagacgcctgtgtcatgctgagaggagaaaggactttgtttctgaagcctacttgatcaccctgggcaaatttatcaacatgtttggtgtgttggatgagctgaagaacatgaagtgcagtgtgaagaatgaccactctgcatataagagggctgctcagtttttacgtaaaatggcagatccacaatccatccaggagtcacagaatctgtccatgttcctggccaaccacaacaagattacacaatctctgcagcagcagcttgaggtcatttctggctatgaagagctcctggcagacatcgtgaatctgtgtgtggattactatgagaacaggatgtacttgacacccagcgaaaaacacatgcttctcaaagtcatgggatttggcctgtacctgatggatgggagtgtgagtaacatctacaaactagatgccaagaaaagaataaatttatccaaaatcgacaagtatttcaagcagctgcaggtggttccactctttggagatatgcaaatagaactggcaagatacatcaagaccagcgcacactatgaggagaataagtcccggtggacctgcgcgtcctccagcagcagcccgcagtacaacatctgtgagcagatgatccagatccgtgaggaccatatgcgtttcatctccgagctggcacgctacagcaatagcgaggtagtcacagggtctggccggcaggaagcccagaagacagatgctgagtaccggaagctcttcgatctggctctgcagggcctgcagcttctgtcgcagtggagcgctcacgcgatggaagtgtattcctggaaacttgtacatccaacagacaagtactccaacaaggactgccccgacaacgctgaggagtacgagcgagccacacgctacaactacaccactgaggagaagtttgccctggtggaggtgattgccatgatcaaaggcctgcaggtgctgatgggcaggatggagagtgtgttcaatcacgccatcagacacacggtttacgctgcgcttcaggacttctcccaggtgaccctcagggaaccactgcgacaggccatcaagaagaaaaagaacgtaatccagagtgtcctacaggccatcaggaagactgtgtgtgactgggagactgggcatgagccctttaacgacccagctctgcggggagagaaggaccctaagagtggctttgacatcaaggtgccacgccgtgctgtgggaccctccagcacgcagctttacatggtgagaactatgctagagtccctcattgcagacaaaagtggttccaagaaaaccttgagaagtagccttgaggggcccaccatattggacatagaaaaatttcatcgagaatcattcttctacactcacttgataaatttcagtgaaacactgcagcagtgctgtgacctttcccagctgtggttccgagagttcttcctggagctgaccatgggcaggaggatccagttccccattgagatgtctatgccctggattctgactgaccacatcctagagaccaaggaggcatcaatgatggagtacgtcctctactccttggacctgtacaacgacagtgcccactatgcgctcaccaagttcaacaagcagtttctctatgatgagattgaggcagaggtgaatctgtgttttgaccaatttgtttataaactagcagaccagatatttgcatattacaaggttatggcaggaagtttgcttcttgacaaaaggttacggtcagaatgcaaaaatcagggagccacgatccacctccccccatctaaccgctatgagacgctgttgaagcaaaggcacgtgcagctgctcgggagatccattgatctcaaccgtctgattacacagcgcgtttcagcagccatgtacaaatctctagaactggcaattggacggtttgaaagtgaagatttaacatcagtagtcgagctagatggactcttagaaatcaaccgtatgacacacaagctgttgagcaggtacctcacactggacagctttgatgccatgttccgggaagccaaccacaacgtgtctgcaccttatggaagaattaccctccacgtcttctgggagctaaactatgacttcttgcccaactactgctataatggctctaccaaccggtttgttcggacagtattaccattttctcaggaatttcaaagagacaaacagcctaacgcacagccccagtatttgcatggatccaaggctttgaacctagcctactcaagcatttatggcagctaccggaactttgtggggcctccgcacttccaagtcatctgccggctacttggctaccagggcattgcagtagtcatggaagagctgctgaaggttgtcaagagcctgctgcaaggcacaatcctgcagtacgtgaaaactctgatggaagtgatgcccaagatctgccggcttccgcgacatgagtacggctctcctggcatcctggagttcttccaccaccagctgaaggacattgcggagtatgcagagctgaaaaccgtatgcttccagaacctgcgggaggtgggcaatgctgttctcttctgcctgcttattgagcaaagcctgtctttagaagaagtctgtgacctgttgcatgcagctcctttccagaatatcttacctcgaatccatgtaaaagagggggagagagttgatgccaaaatgaaaagactagaatccaagtatgccccactgcaccttgtcccactgattgaaaggctgggcaccccacagcaaattgcaattgcaagagaggggcacttgctaaccaaggagcgtctctgttgtggtctgtccatgtttgaagtcatcctgacacggatccggacctttctggatgatcccatctggcgtgggcccctacccagcaatggtgtcatgcacgtggatgagtgtgtggagtttcacagactatggagtgccatgcagtttgtttactgcattcctgtagggacacacgagtttacagtggagcagtgttttggagatgggctccactgggctggctgcatgatcattgtacttcttggacagcagcggcgctttgctgtgttggatttctgctatcatcttctcaaagttcagaaacatgatggcaaagatgagatcatcaaaaatgtgccattgaagaagatggtggagaggatccgcaagttccagattctcaacgatgaaatcatcactatcctggacaagtacttgaaatctggtgatggcgagacgacacctgtggagcatgtacgctgcttccagccacccatccaccagtccctagccagtagctgagggctaagctcacagcatcccagtaactgatggcatgtttgtctttatgtaaactatattgaaatttttaggggctattttccattatgtctgaacctacttttgatctgaaagcttaactttataaaatttacttatttttctatactaaaattgtatatgcctttggaattgggaagtctgagaatacggttactagttgttgccattacggtattaacaagtattttcatgccgaatattccagcagctattataatgctaaatcactcatctgtacgagcataaccactaattgtattaaaaaaaaataaaaa

SEQ ID NO: 56 - DNA, 3271 bp, Mus musculus
gcactcggctgagcattcggcggcatcatggatactgacttgtatgatgagtttgggaattatattggaccagagcttgattctgatgaagatgatgatgaactgggaagagagacaaaagatcttgatgaggatgaggacgaggacgaggatgacgtgggagagcacgaggatgaccaccccggcatggaggtggtgctgcatgaggacaagaagtactaccccacggccgaggaggtgtacggtcccgaggtggagaccatagtccaggaggaagacacccagcccctcacagaacccattataaagccagtgaaaaccaagaaattcactctgatggagcagacattacccgtcacggtgtatgagatggatttcttagcagatctgatggacaactctgagctcatcagaaacgtaaccttgtgtggccatctccaccacggcaagacctgtttcgtagattgtttaatagaacagacgcatccggaaatcagaaagcgctatgaccaagacctatgctatactgacatcctcttcacagaacaagagagaggcgtcggtatcaagagcactccggtgacggtggtgctgccggacaccaaagggaagtcttacctcttcaacatcatggacacgccaggtcatgtgaatttttctgatgaggtcacagctggcttgcgcatctcagatggagtggtccttttcattgatgctgctgagggggtgatgctgaacacagagcggctgatcaagcacgcagtgcaggaaaggttagcagtcaccgtgtgtatcaacaaaatcgaccggctgatcttggagctgaagctgcctccaacagatgcttattacaagctgcgacacattgtggatgaggtcaatggattaataagcatgtattccaccgacgagaacctgatcctttctccactcctgggcaacgtctgcttctccagttcccagtacagcatctgcttcacactgggttcctttgccaagatctacgctgacacctttggtgacattaattaccaggaatttgctaaaagactctggggtgacatctacttcaatcctaagacgagaaagttcaccaaaaaggctcccagcagcagctcccagaggagcttcgtggagttcatcttggagccactctataagatcctggcccaggtggtgggtgatgtggacaccagcctgccaaggaccctggacgaacttggtatccacctcaccaaggaagagctaaagctgaacatccgccccctgctcaggctggtctgcaaaaagttctttggcgagttcacaggctttgtggacatgtgtgtgcagcacattccatctccaaaggtgggcgccaaacccaagatcgagcatacctacactggcggcgtggactctgaccttggcgaggccatgagcgactgtgacccagatggtcccctgatgtgccacacgacgaagatgtacagcacagatgatggagtccagtttcatgccttcggccgggtgctgagcggcaccatccacgctgggcagcctgtgaaggtgctgggggagaactacaccttggaagacgaggaagattcccagatctgcaccgtgggccgcctctggatctccgtcgccaggtaccacattgaggtgaatcgtgttcctgctggcaactgggtcctgattgaaggtgttgaccagccgatcgtgaagacagcaaccataactgaaccccgaggcaatgaggaggctcagattttccggcccttgaaattcaataccacatctgttatcaagattgccgtggagccggttaacccctcagagctgcccaaaatgcttgatggcctgcgcaaggtcaacaagagctatccatctctcaccaccaaggtggaagagtctggcgagcatgtgatcctgggcactggggagctctacctggactgtgtgatgcacgacctgcggaagatgtactcagagatcgacatcaaggtggctgacccagttgtgacattctgtgagacagtggtagaaacgtcctccctcaaatgctttgctgagacacccaataagaagaacaagatcaccatgattgccgagccccttgagaagggccttgctgaggacatagagaatgaggtggtccagatcacctggaacagaaagaagctgggagagtttttccaaacaaagtacgactgggatctgctggctgcccgttccatctgggccttcggacctgatgctacaggccccaacatcctagtagatgatacactgccctcagaggtagacaaggcccttctcggctcagtgaaggacagcattgttcaaggtttccagtgggggaccagggaaggacccctctgcgatgaattgattcggaatgtcaagtttaagatactggatgctgtggttgcccaggaacccctccaccggggtggaggtcagatcattcccacagccaggagggtagtgtactctgccttcctcatggccactccccgtctgatggagccttactactttgtagaggtccaggctcctgcagattgtgtgtctgctgtttacacagtcctggccagacgcaggggtcatgtgactcaggatgcacccataccaggctcccctctctataccatcaaagcgttcatcccggccatcgactcattcggctttgagactgatctccgcactcacacccagggacaggccttttccctgtctgtcttccaccattggcagattgtcccaggcgatcctctggacaagagcattgtcattcgcccgctggagccacagccagctcctcacctggctcgggagttcatgatcaaaacccgtcgtaggaagggcctgagtgaagatgtgagcatcagcaagttcttcgacgatcctatgttgctggagctcgccaaacaggatgttgtgctcaattatcccatgtgagtgaaggggctggcagctctagactcaagccgagacctggtgactgggccctcgagctctgagcatcgggaactgctatggggccgtctgtgcgccccagaaacctccatcccagtgaggaaggggcatctggcctggtttcttctgtggcctttgcctggccccattcccaaggaacagaggagagcttgggcccagagaagaagaatgagagcaagatgtaaatgtttaaccctgaggggcctgtcttcaggacttacatggaattttattttttacaagttccactttagccacagtttataaatgaacaggacattctgaaaaa

SEQ ID NO: 57 - DNA, 3778 bp, Mus musculus
gcccgggcaggtgttgtcatcgctttggtgcctgtcacttctgtcgccacctcctctgcccccagcactggttctccgtcatgaatcccgatctgcgcaaggagcgggccgccgccaccttcaatccagagttaatcacgcacgtcttggatggtagtccggagaacacccggcgccgtcgagaaatcgagaacttgattctgaacgatccagacttccaacatgaggactataacttcctcactcgaagccagcgttacgaggtggctgttaagaagagtgccaccatggtgaagaagatgagggaatttggcatcgcagaccctgaagaaatcatgtggtttaaaaaactacatatggtcaattttgtggaacctgttggcctcaattactccatgtttatccctaccttgctgaatcagggcaccactgctcagcaggagaaatggatgcacccgtcccaagaactccagataattggcacctacgcccagacggagatgggccacggaactcatcttcgaggcttggaaaccactgccacatatgaccccaagacccaagagttcattctcaacagcccaactgtgacttccattaagtggtggcctgggggrcttgggaagacttccaatcatgcgatagtcctggctcagctcatcactcgaggggagtgctacgggttacatgcctttgttgtccctatccgtgagattgggacccacaagcctctgccaggcatcactgttggggatatcggccccaagtttggttatgaagagatggataatggctacctgaagatggacaattaccgtattcctagagagaacatgttgatgaaatatgcccaggtgaagcctgacggcacgtatgtaaagcctctgagtaacaagctgacatatgggrccatggktttcgtaaggtccttcctcgtgggaagtgcagctcagagtctgtccaaggcatgcaccattgccattcgatacagtgctgtgaggcgccagtctgaaatcaagagaagcgagccagagccccagattttggattttcagacgcagcagtataaactcttcccgctcctggccaccgcctatgccttccactttctcggaagatacataaaggagacctacatgcggattaatgagagcattggccaaggcgacctgagtgagctgcctgagcttcatgccctcacagctgggctgaaggcttttactacctggacagccaatgctggtatcgaagaatgtcggatggcttgcggtgggcacggctattctcacagcagtgggattccaaatatttacgtcacgtttaccccggcctgcaccttcgagggggagaacactgttatgatgctgcagacggccaggttcttgatgaaaatctatgaccaggttcagtcggggaagctggtgggtggtatggtgtcgtacttgaatgacctgccgagccagcgtatccagccgcagcaggtggcagtctggccaactctggtggacattaacagcctggacagcctgacagaagcctacaagctacgtgcagccagattggtagaaattgctgcaaaaaaccttcaggcccaagtgagtcacaggaagagcaaggaagtggcgtggaacttgacttctgtcgaccttgttcgcgcaagtgaggcgcactgccactacgtgaccgttaaggtctttgcagataaactccccaagattcaagacagagccgtgcaagccgtgctgaggaacctgtgtctcttatattctctctatgggatcagccagaaaggaggggattttcttgaggggaacatcatcacaggggctcagatgtcacaggtaaacagtcggatcctggagctgctcacagtgactcgccccaacgctgtggctttggtggatgcctttgactttaaggatgtgacccttggctctgttctcggccgctatgatggcaatgtgtatgaaaacttgtttgagtgggccaaraagtccccmctgaacaagacagaggtccaccaatcttactacaagcacttgaagcccctgcagtcgaagctttgaagtttccccagggacaagtctgagctccacagagcggccgaatctctccttgattcactaatccttgtgaaatcgtcttcagacttgtgtagctatagagcaaatgatgggctggcctttccctctctataagtaaagagaaatgagcagacttagagatgaaatgagaatccagtgttgtaggtgcagtagtagcccaggccgacgtaggacctcgggaagccactgccgcgctgtggcctggctgacgttatttgttctgctgctaatctctgtaggccttgactctggggggaattaacagattttaactactaaatacttagtaattttcacattttcactgctaatcactggatatatgttttttaaacaaaggtgttctatagagctggactttccaggcttgcttgcctatgcactttctgatctaccactaagagcaggagtttgggggccagaaactaattagaaacccagattgtgagtgtgtggcccttacatatgcccctgctgcctgctgtgtgggtgtgtcattcctaccaactgtcacactaacatatcaacaagaggagtccttaaacacccacccaccaagaaagcagcgctccgggactaagctcccactctggtcttcctggcaatggcatgcacccgcccatgacccacttcctgacacagctaagttgcttgtctttacctccaggctttcggccgttgcctggacttcaatcatggtggctgaccttccctttcttgccttgcttctcctcaaagagataatagagacaatgaccagtctttcctcatagactcaagtatggggagagccctcagctatggtattccgtagtaatttaggtgactttgttaagtaaattcctgggacaatccagatttgaagactatcgtcttgttgttgtcataaactattaaaatgcttggtcgctaacaaagtatttgacataaaaataaataaataaatcattcaggccaccttttacaccaggaatcacaggaaagccctgggccccagccatctgctgagtgttagttgagaagatggatcctaagccagctgaagaatgagtgcaggctgtgggggaggttcttgctggagtagctggctttgttggtaagctgtagcagccttacagggtggcgaagcagcccccctttggatgcagagcagcctctacaatcattctgaccttaaaggtagagtatggaccttttgtggtatgtgtgtgtatgcttttttttatgtagtgatttttttttttcttcttgagacagggcccagagttggccttgacctctgatcctcagcctcccagatgctggggttacaggtttgcgctgacatgcctggctagtcggaactctttgttcttaaaagcacagtagagagatcattgtgacctattaagtctgtgtctgtggcattggcatcgtgagaacagttctttcagagcagttctgagaacacagtattaatggagtggaattgactattcaagtcaaagccatcagatttgctgacacaagtcttaacctttctcctggaatcaaggtctgataatccctgaagattgacagtaagcagcatgtcacctgtggggtttctatttgacagtaagtcatattctggaaaaatagcaaataaatttaaatgactaaaaaaaaaaaaaaaaaaaaaaaaaaaaaaaaaa

SEQ ID NO: 58 - DNA, 1510 bp, Mus musculus
gcgagcgcgtccttgcttcaaagagatagtgactctcgcgcctccggctaggcctccagcccttctctaccctacgtctcattctccgcaacgcagttctccggcccgcaagcgctccaggctatctgccagtcccggaccccggtactgcgtccccataccgcccgctccaggaccaatccaagctccgcaggccgcgcaccgccatgggggtggagggctgcaccaaatgcatcaaatacctgctcttcgtcttcaatttcgtcttctggctggctggaggcgtgatcctaggtgtagctctgtggttgcgtcatgatccacagaccaccagcctgctgtacctggaactgggaaacaaaccggcacccaacaccttctacgtgggcatctacattctcattgctgtgggagctgtgatgatgtttgtaggcttcctggggtgctatggggccatccaggagtcccagtgtctgctggggacgttcttcacctgccttgtgatcctgtttgcctgtgaggtggctgcaggcatctggggcttcgtaaacaaagaccagatcgccaaggatgtgaagcagttctatgaccaggcccttcagcaagctgtgatggatgatgatgccaacaatgccaaggctgtggtgaagactttccatgagacgctcaactgttgtggctccaacgcactgaccacactgactaccaccatactgaggaacagcctgtgtccctcaggcggcaacatactcacccccttactgcagcaagattgtcatcagaaaatcgatgagctcttctctgggaagctgtacctcattggaattgcagccattgtggtagctgtcattatgatctttgagatgattctgagcatggtgctgtgctgtggcatccggaacagctccgtgtactgaggccctttgcattgcaccagaggatccctggagtgaccagaggccaccttgggggacatggcctgtgtatataatatttctgtatcactctgctacacttagtctttttacttttgagttttttgttttgttttgttttgtttttgttttagttttttttttgtcctgaacttttcctgttaccttttgggagctgacatcacacatgggtggcatatgtgggatgtaggggtggagctggccctggcttgcagggccctgtacgtctgggacccctggagagttctgcctgctgagccaaacctcctctacagctacttgcccagaggctttgtagcctagctagagggccatgcccacccactcaacccactgtgggtcacattgctcacatctttttaatctttgttcctttcctgcctccatttcaagagctgggtttgtaagccctcttatgccttcaatgcacttattctttctaacgtgtcaccttcaactgtaattaaatcttgaaacagtcatttaataaaggaggaaaaaaatcaggcaaaaaaaaaaaaaaaaaaaaaaaaaaaaaaaaaaaaaaaaaaaaa

SEQ ID NO: 59 - DNA, 7355 bp, Mus musculus
tgggcagggcacggaaggctcaagaacctgacctgctgcagcttccagtctcgcgttcgccccaccccgccgcgccgcccgagcgctcgagaaagtccactcggaagaaccagcgcctgttccccgggcagacccaggttcaggtcctggccgcaagtcaccatggctcagcaggctgcagacaagtacctctatgtggataaaaacttcatcaataacccgctggcccaagctgactgggctgccaagaagttggtatgggtgccttccagcaagaatggctttgaaccagctagcctcaaggaggaggtgggagaagaggccattgtagagctggtagagaatgggaagaaggtgaaggtgaacaaggacgacatccagaagatgaacccacccaagttctccaaggtggaggacatggcagagctcacgtgcctcaacgaagcttcggtgctgcacaacctcaaggagcgatactactcagggcttatctacacctattcaggcctgttctgtgtggtcatcaacccttataagaacctgcccatctactcagaggagatcgtggagatgtacaagggcaagaagaggcacgagatgccaccccacatctacgccatcacagatactgcctaccggagcatgatgcaggaccgggaagatcagtccatcctgtgcacgggggagtctggagcagggaagacagagaacaccaagaaagtcatccagtacctggcacatgtggcctcctcacacaagagcaagaaggaccagggggagttggagcggcagctgctacaggccaaccctatcctagaggcctttggaaacgccaagacggtgaagaatgacaactcctctcgattcggtaaattcattcgtatcaactttgatgtcaatggctacattgttggtgccaacattgagacttatcttctggagaaatctcgtgctatccgccaagccaaagaggagcggaccttccacatcttctactacctgctgtctggggccggagaacacctgaagactgatctcctgttggagccatacaacaaataccgcttcctgtccaacgggcacgtcaccatccctgggcagcaggacaaggacatgttccaggagacaatggaggccatgagaattatgggtatcccagaggatgagcagatgggcttgctgcgggtcatctctggggtccttcagcttggcaacattgccttcaagaaggagcggaacactgaccaggcgtccatgccggacaacacagctgctcaaaaggtgtcccacctcctggggatcaatgtgaccgacttcaccagaggcatcctcaccccacgcatcaaggtgggcagagactatgtgcagaaggcgcagactaaagagcaggctgactttgccattgaggccttggccaaggctacctatgagcggatgttccgctggctggtgcttcgcatcaacaaagctctggacaagaccaagaggcagggcgcctcatttatcgggatcctggacatcgctggctttgagatctttgatctgaactccttcgagcagctgtgcatcaactacaccaacgagaagctgcagcagctgttcaaccacaccatgttcatcctggagcaggaggagtaccagcgagagggcatcgagtggaacttcatcgacttcggcctggacctgcagccctgcatcgacctcattgagaagccggcgggtcccccaggcatcctggccctgctagatgaggagtgctggtttcctaaggccactgacaagagcttcgtggagaaggtggtgcaggagcagggcacccaccccaagttccagaagcccaagcaactgaaggacaaggctgatttctgcattatccactatgccggcaaggtggactataaagctgacgagtggctgatgaagaacatggaccccttgaacgacaacatcgccacgctgcttcaccagtcctcagacaagtttgtctctgagctgtggaaggatgtggatcggatcattggcttggaccaagtggctggaatgtccgagacagcactacctggtgccttcaagacccggaagggcatgttccgtactgtcggacagctgtacaaggagcagctggccaagctcatggccacgttgaggaataccaaccccaacttcgtgcgctgcatcattcccaaccatgagaagaaggccggcaaactggacccgcacttggtgctggaccagctgcgctgcaatggcgtccttgagggcatccggatctgccgccagggctttcccaacagggtggtcttccaggagttccggcagaggtatgagatcctcacccccaactccatcccgaagggcttcatggatggcaagcaagcgtgtgtgctcatgatcaaagccttggagcttgacagcaacctgtaccgcatcggccagagcaaagtgttcttccgggcaggagtgctagcccacctggaggaagagcgggacctgaagatcaccgatgtcatcattggcttccaggcctgctgcaggggctacctggccaggaaggcctttgccaagaggcagcaacagctgaccgccatgaaggtcctacagaggaactgtgctgcgtacctcaggctgcgcaactggcagtggtggaggctcttcaccaaggtcaagcccctgttgaactcaataagacatgaggatgagctgttagccaaggaggcggaactgacaaaggttcgagagaaacatctggctgcagagaacaggctgacagagatggagacgatgcagtctcagctcatggcagagaagctgcagcttcaggagcagctgcaggcggagacagagctgtgtgccgaggctgaggagctccgggcccgtctgacagcgaagaagcaggagctggaggagatctgccatgacctggaggccagggtggaggaggaggaggagcgctgccagtacctgcaggccgagaagaagaagatgcagcagaacatccaggaacttgaggagcagttggaggaggaggagagcgcccggcagaagctgcagcttgagaaggtgaccaccgaggccaagctgaagaaactggaggaggaccagatcatcatggaggaccagaactgcaaactggccaaggagaagaaactgctggaagacagagtagctgaattcactaccaacctcatggaagaggaggagaagtccaagagcctggccaagctcaagaacaagcacgaggcaatgatcaccgacctggaagagcgcctccgtagggaggagaagcagaggcaggagttggagaagacccgtcgcaagctggagggagactccacagacctcagtgaccagattgctgagctccaggcgcagatagcagagctcaagatgcagctggccaagaaggaggaggagttgcaggctgccttggccagagtggaagaagaagctgctcagaagaatatggccctgaagaagatccgagaactggaaactcagatctctgagctccaggaggacctggagtcggagcgagcctccaggaataaagccgagaagcagaaacgggatctgggagaggagctggaggcgctgaagacagagctggaggacacgctggactccacggctgcccagcaggagctgaggtcgaagcgtgagcaggaggtgagcatcctgaagaagactctggaggacgaggccaagacccatgaggcccagatccaggagatgaggcagaagcactcacaggctgtggaggagctggcagatcagttggagcagacgaagcgggtaaaagctacccttgagaaggcgaagcagaccctggagaatgagcggggagagctggccaatgaggtgaaggccctgctgcaaggcaagggcgactcagagcacaagcgcaagaaggtggaggcgcagctgcaagaactgcaggtcaagttcagcgagggagagcgcgtgcgaaccgaactggccgacaaggtcaccaagctgcaggttgaactggacagtgtgaccggtctccttagccagtctgacagcaagtccagcaagcttacgaaggacttctctgcgctggagtcccagcttcaggacacacaggagttgctccaggaggagaaccggcagaagctgagcctgagcaccaagctcaagcagatggaggatgagaaaaactccttcagggagcagctggaggaggaggaggaggccaagcgcaacttggagaagcagatcgccacgctccatgcccaggtgaccgacatgaagaagaagatggaggacggtgtagggtgcctggagactgcagaggaggcgaagcggaggcttcagaaggacttggaaggcctgagccagcggcttgaggagaaggtggctgcctacgataagctggagaagaccaagacacggctgcagcaggagctggacgacctgctggttgacctggaccaccagcggcagagcgtctccaacctggaaaagaagcagaagaagttcgaccagctcctagccgaggagaagaccatctcggccaagtatgcagaggagcgtgaccgagctgaggctgaggcccgtgagaaggagacaaaggcgctatcactggcccgggcgcttgaggaggccatggagcagaaggcagagctggagcggctcaacaagcagttccgcacggagatggaggacctcatgagctccaaggatgacgtgggcaagagtgtccacgagctggagaagtccaagcgggccttggagcagcaggtggaggagatgaagacccagctggaggagctggaggatgagctgcaggccacggaggatgccaagctccgcctggaggtgaacctgcaggccatgaaggcccagtttgagcgggatctgcagggccgggatgaacagagcgaggagaagaagaagcagctggtcagacaggtgcgggagatggaggcggagctggaggatgagaggaagcagcgctccatggccatggccgcacgcaagaaactggagatggatctgaaggacctggaggcacacattgacacagccaataagaaccgggaagaggccatcaaacagctgcggaagcttcaggcccagatgaaggactgcatgcgggagctggacgacacgcgcgcctcccgggaggagatcctggcgcaggccaaggagaatgagaagaagctgaagagcatggaggccgagatgattcagctgcaggaggaactggcagctgctgagcgtgctaagcgtcaggcccaacaggaacgggacgagctggctgatgagatcgccaacagcagtggcaaaggggccctagcattagaggagaagcggcgactggaggcccgcattgccctgctggaggaggagctggaggaggaacagggcaacacggagctgatcaacgatcggctgaagaaggccaacctgcagatcgaccaaataaacaccgacctgaacctggaacgcagccacgcacagaagaatgagaatgcgcgacagcagctggaacgccagaacaaggagctcaaggccaagctgcaggaaatggagagtgctgtcaagtccaaatacaaggcctccatcgcggccttggaggccaaaattgcacagctggaggaacagctggacaacgagaccaaggagcgccaggcagcctccaagcaggtgcgccggacggagaagaagctgaaggacgtgctgctgcaggtggaggacgagcggaggaacgcggaacagttcaaggaccaggctgacaaggcgtccacccgcctgaagcagcttaaacggcagctagaggaggctgaagaggaggcccagcgggccaatgcctcacgccggaagctgcagcgtgagctggaagatgccacagagaccgctgatgctatgaaccgcgaggtcagctccctgaagaacaaactgaggcgtggggacctgccatttgtcgtgactcgccgaattgttcggaaaggcactggcgactgctcagacgaggaggtcgacggtaaagcagatggggccgatgccaaggcagctgaataggagcttctcctgcagcccaggcggatggacaaacggctctgcctccctcccccaaccctccacacccctgccttgagactgctctgaccatgtccccctcctcccaaggccttcccgagggcattggcttcctctgctgcagcccttccagtcctccataccctttgagaatctgataccaaagagtccaggctggctcaggccggatgacccacagggtcttgtcctccttgcctgaaagcacgggtggtgggcaagaagggcggccattggagtaggcacaagagttttctatgaatctattttgtcttcagataaagattttgatagctcaggcctctagtagtgttaccctccccgacctcggctgtccccgtcccccgtcccccctgctgttggcaatcacacacggtaacctcatacctgccctatggcccccttccctgggccctattggtccagaaggagcctctgtctgggtgcagaacatggggcactctgggaatccccccactcccttctgggcagcactggtgcctctgctcctccgactgtaaaccgtctcaagtgcaatgcccctcccctcccttgccaaggacagaccgtcctggcaccggggcaaaccagacagggcatcagggccactctagaaaggccaacagccttccggtggcttctcccagcactctaggggaccaaatatatttaatggttaagggacttgcagggcctggcagccagaatatccaagggctggagcccactgtgcgctctggtgcctctcctaggactggggccaagggtggtcgagctgtgccacccactctatagcttcaagtctgccttccacaaggatgcttttgaaagaaaaaaaaaggttttatttttcccttcttgtagtaagtgctctagttctgggtgtcttcactgccttgccctggaactgtgtttagaagagagtagcttgccctacaatgtctacactggtcgctgagttccctgcgcactgcacctcactgtttgtaaatgctgtgattaggttcccttatggcaggaaggctttttttttctttttttttttcttttcttttttttttttttaaaggaaaaccagtcaaatcatgaagccacatacgctagagaagctgaatccaggtcccaaaggcgctgtcataaaggagcaagtgggacccgcacccctttttttatataatacaagtgccttagcatgtgtcgcagctgtcaccactacagtaagctggtttacagatgtttccactgagcgtcacaataaagagtaccatgtccta

SEQ ID NO: 60 - DNA, 3336 bp, Mus musculus
tgcgcgagggtgaaagagacgcacaagtggatcctaaagtccttcccggaggagaggggctgcccggagggaagggacggagtgcgcggagtcagcgcgggcggctgccactgtcgctgccactcccggggccggagggacgtggtcaggctgccagggcgtgatggggccgcggccagagcctcgctgactaccggtggcgggaggaagggacccggaacagcccacgggggggatgccaagaggcaggccgtttcctgcacccagcacctaagcagctggggtccgtgcaccccgcggggacggctctggctcggagcgtggcccatgtcctgcgcgggtgaagccctcgctcccgggcccgcggagcaacagtgcccggtcgaggcgggcggcggccggctgggctccccggcccacgaagcatgtaatgaggacaatacggagaaagataaaaggccagctaccagtggccataccaggtgtgggctgatgcgggaccagtccatttggccaaatccttcagctggtgaacttgtcagaacccaacctgaacgtctgcctcaactccagacatcagcacaggaacccggcaaggaggaaacaggcaagataaagaatggcggccacacaaggatgagcaatgggaatggaattcctcacggagccaaacatgtgtccgtggagaatcacaagatatcagcccccgtttctcagaagatgcacagaaaaatccagtccagcttgtctgtaaacaatgacatcagtaagaagagtaaagtaaatgctgtcttttccccaaaagcagcctcctcacccgaagactgctgtgtccactgtatcctggcatgcttgttctgtgaattcctgaccctctgcaacattgtcctgggacaagcttcgtgtggcatctgcacctccgaagcctgctgctgttgctgtggcgatgagatgggtgatgactgtagctgcccctgtgacatggactgcggcatcatggatgcctgttgtgaatcgtcagactgtctagaaatctgcatggaatgctgtggcatctgttttccttcataaaagatttatctcttgtttttactaaaactggagacaactttacaatatttcttgtaggggaaagaaaggcgcatggtaagactcccatgaaacaactcagtatttgcactgttttttgtagacccattccttctaagtaagctctgaaattcttcctttcgccggatgtatgtggtttaatatgtgaagttttgactgtctaattggttttttgaaacttcttcatagatgacaataattggaagacattttgacacacacagcctaaaatgttaaatgtcttctttctcttgacatgtctgttttcgctaaccattctgagcagctctttgctctaaacacaacattgctcagtatgtatttaagccagatcactttgatgtttatctattggaggttaaaagcaaacttttttttaattctaagtaagcacaaacattgggcagagccgtaaacagatgtgggactctccgtgttggtctcctctgggcttttcagctctcttgttctgccagagtgctctgaagaagatcacattgctctcatccagagcggcaggaagtgtaatggaagcaagcaggatgggagctgtaaaggatgaaccaggtttcaaagcatgctggcttcaagactgtaaaggcaagaggccataggaacatacagaagtgaataacaggttacagaagaaggcctggaggaagatatggcactgtggatgctctaggaccagctacttgaatttaaggaaatgttgaaggtacacagcctagactgtcagtgctttggacaagtgaaaaggatttgccttgtatatcgcagcaacacagctttcttagaactgtaaaatctcaactaatgcaaatacgcactttcctacatgtaatttaagtgttataaattttaatgaaaacataataccttgttaacataactatattttaccaaaaaatgtagaacactttttaacaacgttcatttaaatgagctggttttttttccttttttttaagattaaaaaaatcccagtattccttggggtttttccaaagctgccttatatttggaaagactcggttctatttattttcattggcttgtagtcctagccatgttgtctttcataaggaggtgagttttggatccactacaggaggacttccgacgtccaacaccatccaccaggtatcaggattccaactgtgtgtgaaattatgccaagtgacaggttataaagatactaaagtacgaagaagaggggctgcaatgagactaattctacagtgatggagtcagctcatgtggaggggagagtttggattcacacacaccctcccgtgggcgttttccctttctctccagattttaaaatttggttatattgactgattccttgtaggctcttgagagtatgttgttgttagtggttctttctagttccagatgaatattagattgttagaaataatgcaatcttaagaagccattagccagcctaggcctttaggagacttaaactttttttctttttcatgaagaatggcgacatcaccagtgtctttcctttgaaagttagcttagcttataattaaattattattttaaatattctttgaaaaagaaaagctaatccgtctcctttctagtgcaatttccacgtgcatacactttaaatacgatgctaatgtacagctgccttcctcctcgtctttgaaacagaagctttgattcgctgcgtcaaatataatggcaaccttagtatttccacatacccaatgctagtgtgtgcttatatcataggatgaagaagtgccatctgtttatggataagcctcctaatgattgttaaaatatttgcctcattatcctgtaaaactgtttaaccaagaggcttgtctgatgcttgaatatatcttgctatgatttgcaatgaaaatgttagtgcattcgacatgtttttctgtaatagagagcattagtgaacaccagaatttaatttccatacttgtacaggtaggactattcttcagctctctactccaggcaagccattccttaaggcatcttgtataattcaaaagaaaaataggcaaatgtgaaaacagttttagcatattttagaattttggcatgtaaagtgttttgttgaaccttatggccgtcaagactaattgctatagtttacacctagatattccatctctttttaaacgtggcatattttcaaactggatcctgactattttaaaattaaaaagaattatgatg

SEQ ID NO: 61 - DNA, 1214 bp, Mus musculus
gggagactatgaggagccgctggatttggcggttcctgcgccctgacggctgcggaatccgctggacttcaactcctcatgggcgtctgtcacccgccctgcggagagggttcttgaccaccacaactaagtcagattatgatagaagaccagtggatataactcctctagaacaaagaaaattaacttttgatacccatgcgttggtgcaggacttggaaactcacggatttgacaaaacacaagcacagacaattgtatcagtgctaagtacgctatcaaacgtcagcctggatactatctacaaggagatggtgactaaagctcagcaggaaataacagtccaacagctaatggctcatttggattccatcagaaaagacatggtcatcctagagaaaagtgaatttgcaaatctgagagcagagaatgagaaaatgaaaattgaactagatcaagttaagcagcagctgactaatgaaaccagtcgaatcagagcggacaataagctggacattaacctggaaaggagcagagtgacagacatgttcacagatcaagaaaagcaacttatagaagcaaccaatgaatttgccaaaaaggatacacaaaccaaaagtattatttcagagaccagtaataaaattgacactgaaatcgcttccttaaaaacactgatggagtcgagcaaacttgaaacaattcgttatcttgcagcctcagtgttcacttgcttggcgatagcattggggttttataggttctggaaggagaactgacgatgatgctgccgctgctgctgccgccgctgctgccgctgctgctcactccatagaatgtactcactacaaactcttcaaagggcttgtggactaaataaagtgtttggtattttattcttatgttgtatgtctttatgttgaaaagctgtcactcaaacctggcttgatatagaagtccttatcctctgataactatagcaataaaaagttttgcatttgagctttgtaaatgaagttggattttatatcagattacatttttgaaaacaattctgtagtctatacacttactggattttactttcttggttattattgcaattagatttttatataaaataaaatactataacaaagttggttgatttttcaaagtgacttcctatgtaagtggcgattttttgtagtgaataataaattttaaaataatgt

SEQ ID NO: 62 - DNA, 2892 bp, Mus musculus
gagtccctcctggtcactccgccgacgcgatggccgtccccggctcactggccgagtgtggctacatccggactgtgctgggccagcagatcctgggtcacctggacagctccagcctggccttgccctccgaggccagactgaggctggccggcagcagcggccgcggcgacccggcggcccggagccagcggatccaggagcaggtgcagcagaccctggcccgccggggccggagctctgcggtcagcgggaaccttcaccgaaccagcagtgtccctgagtatgtctacaagctacacgtggttgagaatgactttgttggacggcagtcacctgtcactagggactatgacatgcttaaggctggaatgactgccacttatggaagtcgctgggggagagcagcagcacagtacagttcccagaagtcagtggaggagagatcctggaggcagcctctgaggagacttgagatttccccagatagcagcccggagagagcccactatgggcacagcgaataccagtatgcctggcggagccacgtggtgcctggtgggcgcctcaccctgccacgctatgctcgctcagagatcctgggcctacgccaggctggcacagcccgcaggccacctgggtgcgggtcattcagcgatgctgtcttcgacaatggcccactcaagcccacaatgcccacccaccctcctggcaccagccacagtgcgggcagcttgttggaagagaccactgtgcgcgtgagccaggctcggcttcaaagcacgcagagcagaaccgcccgctcctcctggcccaggagctcagtccgcagtagcctgcgggagccaggaagaatgctgaccaccgcaggccaggctgccgtgggcagcggggatgcacatggggacaggagtgtcttcgctgacgcccagctggggaatgcagacatcgaaatgaccttggagagagctgtgaatatgctggatgcagaccatgtaccagtatccaagatctctgccgcagctaccttcatacagcatgagagcttccaaaaatctgaagcacggaaaagggtcaatcaacttcgaggcatccctaagcttctacaactgctcaaacttcagaacgaagatgttcaacgggctgcttgtggggccttgagaaacttggtatttgaagacaatgataacaagttggaggtagctgaactgaatggagtgcctcggctactgcaggtgctgaagcaaaccagagacttggagacaaaaaagcaaataacaggtttgctctggaacctgtcctctagtgataaactcaagcatctcatgataacagaagccttgctcaccttgacagagagtgtcatcatccccttctccgggtggcctgaaggcgactaccccaaagccaatggcttgcttgattttgatatattctacaatgtcactggatgcctaaggaacatgagctctgctggccccgatgggaggaagatgatgagaaggtgtgatggtctcattgactcattggtccactatgtcagaggaactattgcagactaccagccagatgataaggccacagagaactgtgtgtgcattcttcataacctctcctaccagctggaggcagagctcccagagaaatattcccagagtatctacatgcaaaaccggaatatccagactaacagtaacaaaagtattgggtgttttggcagccgaagtaggaaactaaaagagcaataccaagacttgcagatgccagaggaaaggagcaatccacatggcattgagtggctgtggcattccattgtgataaggatgtatttgtccttaattgccaagagtacccgaaactatacccaagaggcatcacttggggctctccagaacctcacagcaggaggcggcccgatacccacattggtggctcgaatggttgtccaaaaggaaaatggtcttcagcatacacggaagatgctgcacgtgggtgatcccagtgtgaaaaagactgcggtctccctgctgaggaatttgtcacggaatctttccctgcagaatgaaattgctaaagaaactctaccagatttggtttctataattcctgacacagtcccaagtactgaccttctcattgaaaccacagcctctgcttgctatacgttgaacaatttaatgcaaaatagttaccagaatgcacgagaccttctgaacaccggaggtctgcagaaaattatgaccatcagcataggggaaggctatgcccccaacaaggccagcaaagcagcctctgtcctcctttactctctgtgggcacatacagagctgcatcacgcctataagaaggctcagtttaagaaaacagactttgtcaacagccggactgccaaagcctaccactctcttaaagactgatgaagtggggaaaaaaaaacctcaggaattccagtttcacagttctccacttaaaaataaaataagataaacaattaaaaaaacctcctcaaagaaaacacctatttttctactaactgacccaagaaacctcaaaaagcatgctttgtttatattcttttctattttcatccccaaatctagaaaatgaataatcagaatataattttgttaagtgtcctgaagacttccaccaggttgcaccagtatggaatcagttttaccctgtgcagataatgggcatcattattcaggcttatagtatgtgcaaactcgtgtgagtgtgcaccggaggaacacctgagaaagagtgtgtgaatgatgtttctatcctagttgctcatctgcatgtcacttccttaatgagccagaggtgtgtgttcactagtgttggacaggacagagatgaaggaataaagcattgatggcaaatcgc

SEQ ID NO: 63 - DNA, 1372 bp, Mus musculus
acgcttccgtttctggttttcctccagtgtttgggtttcctcgcagccggccaagatgaaccgattcttcggaaaagcgaaacccaaggctccgccacctagcttgacggactgcattgggacggtggatagcagggcagaatccattgacaaaaagatttcccggctggatgctgaactagtgaaatataaggatcaaatcaagaagatgagagagggtcctgctaagaacatggtcaaacagaaagccctgagagttttaaagcaaaagcggatgtatgagcaacagcgagacaacctggcccaacagtcctttaacatggagcaagctaattacaccatccagtcactaaaggacaccaagaccacggttgatgccatgaagttgggagtaaaggaaatgaagaaggcatataaggaagtaaaaattgaccagattgaggacttacaagaccagctggaggatatgatggaagatgcaaatgagatccaggaagccctgggccgcagctacggcaccccagagttagatgaggacgacctggaagcagagttagatgcgctgggcgatgagcttctggctgatgaagatagctcctacttggatgaggcagcttccgctcctgcaattccggaaggtgttcccactgacacaaaaaacaaggatggcgtgctggtggatgaatttggactgccgcagattcccgcttcgtagacttacaacattccagcacgtgatgtgaaacaacaagagaagtattctgggactaggaaatagttcccgatctgccaaccagatttaggtttctttcctttctttgaaggaaaagctatctacactgctcctgtatttttattttttccgttaaggaattcattgcttttgggaagctgtctttactaaaacttgattcttttttttttttttctcttaggaaagactaattgaaaagtacccttgactttgtatgacttgttttcattcattaacaataatctgaaattaaaccaaggagatgagactctgaattctatggtagtgtaagtacagtctcagtgtgctgatacattgataagataaaagtgattgatgagattgggactgctgatagtatgcttcagaacccttgtctgttgtggtattgtagatgggtttaagtcatggcctcttttgatagattttgttgtgtcatgtgagcaagtcattacacgatctactgttggaatgaactgtctctacggtatcatgagttactattttgattccatggttccctcagtatactagcctgacttgtaatgaataatgaatatttcttgatatttaatgtataggacatttatttatactcaataaatatttttcaaaagg

SEQ ID NO: 64 - DNA, 2767 bp, Mus musculus
gagatcacgtttgccacccacagccaaacactcttgtccaagtccgcgggcaagaggcgattggggacgagcgagctcggcatctcaggcccagtccggtccacaccagcccgaggcggaatatcctgatcgccccccaccaggccacctcccctcgtggaatcggagcggcggcctcacaggaaggcagaagcgaaatgtagcgagccgggtgtcgcggttggacgctcgccttgcctgggggtgtagcggggaacacgcgggggctcgaggaggacggctgagggggaggagtgatgagaagagggggtaccctacatcccccaattccgcgggcccctgctaccactctccaggcgccctttctccccagcaaggcgcaggtgttccacaccaattcttgtgactttaaggaccaggcaactgagaaagtacaagatcctctcaagaagggaagacatctctgggagagagaggaaagatagcagacactgggaccagctgagcccagccacggtgctgtgagaagctgaagccacccagcaggagtgagaagaaaccctggcctcagattgaggcttcgttctcaacgatctgaactcattcagcttttcccgagagagggctgcagcatcaggcactccagactcaggttgagctcttctgctcctgctctgaggagctggccactgagaaccaaagattgcccctggcacaacacagagctgctgggagcaggcacccactacccatagaggcagctgctgcatctggtgaggactttgtttccttccagctccaggctgcattgcttgatggggttgtcttttggtagatcagtttttacagtgcccggtaggagtggagagccgtgggaagaggtcttgcggcaatcaagcctgggttcaccccaagactaagttctttcccaagtcagagtcgaagagagaaagaaaaataaataaattctcccctcctctcctccctgcctgtcatgtcctctaagccagagccaaaggacatccaccagccgaatggtactggccctactccttctccctgttcttcggatggccctgggcgagagcccttggctgggacctcagagttcctggggcctgatggggtggaggtggtagtgattgagtcccgagctaacgccaagggaattcgggaggaggacgccctactggagaacgggagccagagtaacgagagtgacgatgtcagcacagaccggggccccgcgccaccctctccgctcaaggagacctccttttccattggactgcaagtgctgttccccttcctactggcaggctttgggactgtggcagctggcatggtgctggacattgtgcagcactgggaggtcttccagaaggtgacagaggtcttcatcctggtgcctgcactgctggggctcaaagggaacttggaaatgaccctggcgtcgaggctgtccactgcagccaacattggacaaatggacacacctaaggagctctggcggatgatcacggggaatatggcccttatccaggtacaagccacggtggtaggcttcctggcatccatcgcagccgtcgtctttggctggatccctgatggccactttagcatcccacacgccttcctgctatgcgccagcagtgtggctacagccttcattgcctccttggtcctgggtatgatcatgatcggagtcatcattgggtctcgaaagattgggatcaacccagacaacgtagccacgcccatcgccgctagcctgggcgacctcatcaccttggcactcctctcaggcatcagctggggactctacctggaactgaagcactggcgatacatctatcccctggtgtgtgccttctttgtggccctgctgcctgtctgggtggtgctggcccgaagaagcccggccacaagggaggtgttgtattcaggctgggagcctgtcatcattgctatggctatcagcagtgtgggaggtctcatcctggacaagaccgtctcggaccccaactttgcaggaatggctgtcttcacacctgtgattaatggtgtcgggggcaatctggtggctgtgcaggccagccgcatctccaccttcctccacatgaacggcatgccaggggagaactctgagccaactcctcgccgctgccccagtccatgcaccaccttcttcagccctgatgtgaattcacgctcggcccgtgtcctcttcctccttgtggtcccaggacacctagtgttcctctacaccatcagctgtatgcagggcgggcacaccaccctcaccctcatcttcatcatcttctacatgactgctgcactgctccaggtgctgattctcctgtacatcgcagactggatggtgcactggatgtggggccggggcctggaccccgacaacttctccatcccatacttgactgctttgggggacctgcttggcaccggactcctggcactcagcttccatgtgctctggctcattggggacagagacacagatgttggggactagcttagccattcagtctttcccccacccctctgcactttctatttggatttttattttccttttgtttccctaccccaccctacactacactcccatgcctttctgggatttcactttgataccaaattctcattattttcaatgggaattttttatacattgagccaagtttggataggaagaattcgggacagacagatgggctgacataagcagtaaaagtagacttttgag

SEQ ID NO: 65 - DNA, 4622 bp, Mus musculus
gagggaccagatctctggcggggagcagggtgcaaggcagccaggtctccagtcctctctgcagcatggggaagcgctggctcccaagcctggccctgctgccgctgccgccaccgctgctgctgctgctgttgctgctgctgcccacaaatgcctcagcaccacagaaaccaatctacatggtgatggttccctccctgctccacgctggcacccctgagaagggctgcctcctgttcaaccacctaaacgagacagtaacagtgaaagtatccatggagtctgtccgtgggaaccaaagcctcttcactgaccttgttgttgacaaggacttattccactgtgcctccttcatcgtcccacagtcttcatccaatgaggtgatgtttctcactgtccaagtaaaaggaccaactcatgagttcaggaggaggagcacggtgctgatcaagactaaagagagcctggtctttgctcagactgacaagcccatctacaaaccaggacagatggtgagatttcgtgttgtctcattggacgaaaatttccacccccttaatgaattgattcctctactgtacattcaggattcaaaaaaaaatcgcattgcacagtggcagaatttccgcttagagggtggcctcaaacagctgtccttccccctctcctcagagcccactcagggctcctacaaggtggtgatacgtacagaatcaggcaggaccgtcgagcaccccttctctgtgaaggaatttgtgcttcccaagtttgaagtcaaagttgcagtaccagagacaatcaccatcctggaggaagagatgaatgtgtccgtgtgtggcatatacacctatgggaagcctgttccaggacacgtgactgtgaacatttgcagaaagtacagtaatccttctagctgctttggtgaagaatcgctggctttctgtgagaaattcagtcaacagctagatggccgtggctgcttctcacagctagtgaaaaccaagtctttccagctaaagaggcaagagtatgagatgcagcttgatgtgaatgccaagatccaagaagaaggaacaggtgtggaagaaaccggtaaagggctcactaagatcacaagaactataacaaaactatcatttgtgaacgtggatacacatttcggacaaggaattcctttcgttgggcaggtgctcctggtggatgggagaggcacccctattccatatgaaatgatcttcattggagctgatgaagcaaaccagaacataaatactaccactgataagaatggcctggcacggttctccatcaacactgatgacatcatgggcacgtccctaactgtcagggccaaatacaaagatagcaatgtctgctatggatttagatggttgacagaagagaacgtagaggcttggcgcactgccaacgctgtcttctcaccgagcagaagcttcgtgcacctggaatccctgccctataaactgcgctgtgagcagaccctggcggtccaggctcattatattctaaatgacgaggctgtgctggagcggaaggagttggtcttctattatctgatgatggcaaagggaggcattgttcgggcagggactcacgttctgcctgtgacgcagggacacaagaaaggccatttctccatcctcatctcgatggagacagacctggctcctgtagctcgactggtcctttataccattctgcccaatggagaagtggttggagatactgttaaatatgagattgaaaagtgcctggccaacaaggtggatttggtcttccacccaaatatcggtcttccggccacacgtgccttcctcagtgtcatggcttctcctcagtctctctgtggcctgcgagctgtggaccaaagcgtactgctcacaaagcctgaggccgaactctctgcatccctggtttatgatctgctaccagtgaaagacctcactggcttccctaagggtgtgaatcaacaggaagaagacactaatggctgccttaagcaaaatgacacttacataaggaatcctgtactccccaggcagaatacaaatgaagaggacatgtatggcttcctaaaggatatgggcttaaaggtattcaccaacttgaacatccgtaaacccaaagtctgtgaacgccttggagtcaataaaataccagctgcataccaccttgtaagccaaggccacatggatgcttttctagagtcttcagagtctcccacagagactacacgaagctacttccctgagacgtggatctgggacttggtgatcgtggactcaacaggagtggctgaaatggaagtgacagtccctgacaccatcactgaatggaaggctggggccttctgcctgtccaatgacactgggttgggcctctctcctgtgatcgatttccaagccttccagcccttcttcgtggatctcacaatgccctactccgtgatccgtggagaggccttcacgctcaaggccactgtgctgaactacctccagacatgcatccgggttggtgtacagctggaggcctctcctgatttcctagctaccccagaggagaaggaacaaaagtctcactgcatctgtatgaacgagcggcataccatgtcctgggcggtgatccccaagtcattaggaaatgtgaatttcacagtgagtgcagaggcactggactctaaggagctgtgtaggaatgaggtgccagtggttcctgaacgtggaaagaaagacacgatcatcaagtccctgctggttgaacctgaaggtctagagaatgaagtgacattcaacagtttgctttgtccaacaggtgctgaggtatcggaacagatatctctgaaactgccatcagatgtggtagaggaatctgcccgagcttctgtcacagttttgggagatatattgggttctgctatgcagaacacacaggatctccttaagatgccctatggctgtggagaacagaacatggttctgtttgctcctaatatctatgtcctggactatctgaatgaaacagagcagctgacacaggagatcaagaccaaggccattacctatctcaatacgggttaccaaagacaattaaactacaagcaccgggatggctcctacagtacttttggggataaacctggtaggagtcatgccaatacctggctcacagcctttgtactgaagagttttgctcaggctcgaagatatatcttcatcgatgaatcacacatcacccaagccctcacctggctctcccagcagcagaaggacaatggctgcttcaggagctccgggtcactgctcaacaatgccatgaagggaggagtagaagatgaagtcactttgtctgcctacatcaccattgctctcctggagatgtctcttcctgtcactcatcctgttgtccgaaatgccctcttttgcctggacacagcctggaagtcagcgaggagaggagccagcggcaaccatgtctacactaaggcactgttggcctatgcatttgcccttgctggtaaccaggacacgaagaaggagatactgaaatcactcgatgaggaggcggtaaaagaagacaattctgtccactggaccagagctcagaaacccagagtgccagcagatctctggtaccaaccccaggctccctcggctgaggtagagatgaccgcttatgtgctcctggcttatcttaccactgagctggttccaacccgagaggacctgactgctgcaatgctcattgtgaagtggctcacaaagcagcagaattcccacggtggcttctcctccacccaggacacggtagtggctctccatgctttgtccaaatacggagcagctactttcacaagagcgaagaaagctgcacatgtgaccatccagtcttctggcgcattttatacaaaattccaagtgaacaacgacaaccagttattattacagagagtcacattgccaactgtgcctggggattacaccgcaaaggtagctggagaagggtgtgtctacctccagacatccttgaaatatagtgttctcccgagggagaaggagtttccatttgctttggtggtgcagactctgcctgggacttgtgaggatctcaaagctcacaccaccttccagatctcactcaatatcagttacattggaagccgttctgactccaacatggcaattgctgatgtgaagatggtgtctggcttcatccccttgaaaccaacagtgaaaatgcttgaaagatctgtgcatgtgagccggacggaagtcagcaataaccatgtcttgatttacttggataaggtgtcaaatcagatgctgaccttgttcttcatggtgcagcaagatattccagtgagagacctgaagccagccatagtgaaagtctatgattactacgagaaagatgagtttgcagttgcaaaatacagtgctccctgcagtgcaggttatggaaatgcctgaagacactgtgaataagaagtgtttcaccagagccctgttcttaggacttctcaagaaaaagtggtttttgtatttccagagatttgataaataaagcattctttcatatctatccatcaaaaaaaaaaaaaaaaa

SEQ ID NO: 66 - DNA, 6998 bp, Mus musculus
cggacgcggacgcacggggacgcggccatggaggaggacgcgggagctgctagcccggcgccggagcctgagccggaggtggatcccgcccgggagctggagcccgaggccggtgtctccgagtcaatctcccgcctctggaccgacgtgatgggcatcctggatggttccctgggaaacattgatgacctggcacagcagtatgcagattattacaatacctgcttttctgacgtgtgtgagcggatggaggagctccggaaacggcgcgtttcccaggacctggatgtggagaaacccgacgccagccccacgtcacttcagctgcggtcccagatcgaagagtctctaggcttctgcagcgccgtgtcaacaccagaagtggaaagaaagtaccctctccataaatcaaactcagaagacggctgtgtaggcaaaggagattggaagaagaaaaataaatacttctggcagaatttccgaaagaaccaaaaaggaataatgagacagacttcaaaaggagaagatgtgggctatgtagccagcgagattacgatgagtgacgaggagcggattcagctgatgatgatggtcaaggagaaaatgatcaccattgaagaagcgctcgccaggctgaaggaatacgaggcccagcaccgtcagtcatccaccttggaccccgcagactggcccgatggctcctacccgacattggatggctcctccacctgcaactcaagagagcagtcggatgatgagacagaggactcggtgaagtttaagaggttgcacaagctggtaaactctactcgaagagtcagaaagaaactaattagggtggaagaaatgaaaaagcccagcgcagaaggtggagaggaacatgtatttgagaattccccagtccaagatgaaagatctgcactctactctggagtgcacaaaaagccatttttctatgatggctctcctgagaaacctccagaagatgatgcagactctctcaccccatctccatcatccagcagcctggatacgtggggagctggccggaagttggtcaaaaccttcagcaaaggagagagtcggggcctgattaagccccctaagaagatggggacattcttctcctatccagaagaagagaaggcccagaaagtgtcccgctccctcacagagggggaaatgaagaaaggtcttgggtctttgagtcacgggagaacctgcagttttggtggattcgacctgacaaaccgttctctgcatgttggcagtaataattctgaccctgcgggtaaagagggagattttgtgtacaaagaagtcatcaaatcccctcctgccccccgcatctctctcgggaaaaaggtgagatcagtgaaagagaccatgaggaagaggatgtctaaaaagtacagcagcccggtctcagagcaggactcggggctcgatggaatgcccagctcccccgcctcaggaaagcctgactccgaacacgtggacaagcctaagctcaaagccgggggctctgtggaaagccttcggagttctctgagtggccagagctcaatgagtggtcagacagtgagcaccactgattcctccaccagcaaccgggagagtgtcaagtcagaagatggggatgacgaagagccaccctatcggggtcccttctgtgggcgtgcccgagtgcacactgacttcacccccagtccctatgacacggactctctgaagctcaagaaaggagatatcattgacataattagcaaaccacccatgggtacctggatgggcctgctgaacaacaaagtcggcacgttcaagttcatctacgtggatgtgctaaatgaggaagaggagaagcccaagcgccctaccaggaggaggaagaagggaagaccatctcagccgaagtctgtggaggatctcctggaccggatcaacctgaaagaacacatgcccaccttcctgttcaatggctatgaagacctggacaccttcaaactcctggaggaagaagacttagatgaattaaatatcagggacccagaacacagagcagttcttctgactgcggtggagctgttgcaggaatatgacagtaacagtgaccagtccggttctcaggaaaagctgctggtggacaaccagggcctgagtggacgatccccacgagactccggatgctacgaaagcagcgagaacttggaaaacgccaaaactcacaaacccagcgttctgtctaccaagtcgtccacggagtccaacttaaagtctttcaccaggagtcagccaggcaactacccgacattgcctttaatgaaatcaggggaggtgcgcaagcagggagaggagggcaggctgggacgaggtctagccccggacactgccaagagctgtgacgtgccctctgtgactgatttgagtaaaaaccgaaggagcctcccggtctccatctgtcgcagctgtgaaaccctggagggtcctgagcctgtggaaagttggccccgatcccattccctggatgaccttcagggagatgctgatgttggcaagaatgtgcctaccgagatgccagaaacctgttctcagaatgtaccagaagtgccgcagaagacgtctgcctgcacctccaaggctctgccacgaggccgagatcccacagcagatgtgatgcttctgacccaaagcaagagattttccgaccccccgaaaacaatggctaagaaactggatggctccgtggtggcctccaaccttgggatagctcctcctcagtgtatacccagagatttcgaggcccagccgcctgttaaacccggcttaacaaggacgtctcttgagggtctcagaaaaggacatgatcaccaccccctgggcaccaaagaaggggtagacggggagcagagcgcccctgagaccaggacacagtcccgacatccgtcgcagccccctcctgtgccagccaagaaaagccgagagcgcctggccaatggcctgcacttggtccccagcccagaggcacccatcctgccactgaagaaagccagccctgccagcccagtcagtcccagcgactgcccctctccccgggaacccaggccttcctccgggactgagccgggcagcccagcctgtacgagacctccaccctggctggctgagctgcccgagagcactagcctgcaggagcatggtgtgaaactgggcccagtgctgagcaggaaggtttcctgtgtccggggtgtggacctagagatgctcacggagaacaagctgcaggcggagggcattgatctcactgaggagccctactctgataagcatggccgttgtgggatcccggaagccctggtacagagatacgcagaggacctagagcagcctgagagggatgttgccaccaacatggaccagatccgggtgaagctgcttcggaagcaacatcggatggcgatcccgagtggtgggctgacggaaatctgcagaaagcccctctctcccggctgtgttgcgtccatgtcggattggctcatctctatcggcctgcccatgtacacgagcaccctttctgacgcagggttcagcacgctgagccaagtgccttccctgtcccactcttgccttcaggaggccggcatcaccgaggagagacacataaggaaactcataacggcagccagactcttcaaactgccaccaagccctgaggctatgtagccaggccggcgtggccctccctagacaagagccagcctctcactgtgcttaggaagccgatacaatccctccacgtctgctggggttgaagaaaagtattctctcggggctcacgaactgcaggattgggactcagaaccgaggcccctctcttccggtaaagccctcctcccctgcccctcgaggaaatcgaggtgattctctttgatgcccaaaggcaagacacgcacttagttccgttttcaggcactgaagagccaagacactacaaacagtgtgtgtccagtctgtctttgtgctgtcagagggctaggaggacgaggcagccggctcgtgtctgatcgtgcccttgcgcatctgttggtcacccgatgcccgagcccgatgggcttagctaggccaaagcaacagactctggagttactgtatactattgaccatgctcatttgttcaaaagctacaacagctgactctatcaagaacagaacggtcctcctctcctgtagataaacgaccagagacattttaattgctttctagcaattagcttttatttgccttaatataaacttttaaccagttatctatctagtgtccacagcccttacttaaccctagttccagattttcagcttagactgccatctaacgtgtttgggatgtttccagcaaaaatagcctttttttttaaaaaaacagtctcattctaacatggcttattttataagggtgactaccaggcacacgtttcatgttgacttttagtttttgaactaactataatttagtaaaagtcgatcgggactcacagaggggcacgtgtgtgtgtagtgactgcccttcagtcttctgcctttagtgagaggctgtcacagtggccatggtgttgtgagtggctgtcacggtggccatggtgttgtgagtggctgtcacggtggccatggtgttgtgagtggctgtcacggtggccatggtgttgtgagaggctgtcacggtggccatggtgttgtgagaggctgtcacagtggccatggtgttgtgagtggctgtcacggtggccatggtgttgcagtatttatgtgaaatcctaacctcatccatccccaaatccattcatcaactatcagatcacctttgcagaaagccattgtaagttgcatatttcagaaagatttttttttctaaaaagggaagtagtttactcatttaaagttctttttgtttgtttgtttttaattttttttccattttggccggttttattatctctcatttgttatgtagataattattttaattcaagcaaaggttcattatggagccagataaaccacatccgctgggtgttaaatattgcatattttcaactggtttttccaactttgatttccatgtgatctgccctctttttgtctggcgtctggttttctagcagttggcacacttagacaggtgtgcctgatccattgcttacaaagtgttttttcttcatattcttgcaagcacgatgtgaagtctccagttatcgtggaagcattttgaatacaaggcccggatcagtcctccgctagttcatttgggttattacaatttgattcccctcagaagagaagggcaagcggttttatgaataacaacgccatcctggccttatggtttatatagctggtccacgtctctgaggaacatctcaggtgattccccccaccccacacacattttagtgtgcgctaaaaaataataatattgcttggtttcctcacttcccttcgcctactataaaatgccacgtggagaagttgaggcagtttagaatgagaagagtaaaggcactgggttcctattggactcttaataaagagctcacggttagcttccagggtcaggcataggccacccaatgggtgggggtgcagggttctctgccagtccaggacccagtcacatgctgttgtgggggttggcattggaaaacaggcttcttctcttgcttttgaagtaaccctggcctgaccgtgcaacagactgccctttgattttagctgagcgaagagagagagacctcgcaaaagtaacatcggaggtaaccagggaggaggagaaatcttttgggaatttccaagtttcagttcattcttggtgtagggttttctgttttaagtcaatcaaggaggtcttgagaatgtcaaacagtagcttttttctctctggaaattgtcgcctttgcatggagaattaaattcagggaccacgagtttagtgtgaatgtctgatctgaaggggctgaggcttcttatccctccctccctccctccctccctccctccctccctccctccctccctcccttcctttcctttccttgtatcatatttgtttggttttcttttgctttgaacgtttcatttggtctgagaaaagcctgaacattagcgtatgactctgaggagactcggggctgcctgtggctgttagcggacaggcggccggctttagcaatagccacttttgatcggttgcatttggtacagaattttgaatgacagtgaaaattgttgtctttgcaaagcacaaaactaacctggaaaggcgtttcggctcaggtagctacccagaatgtgtgtgattggtgtgtctccgctgtctgcagagaaagcagctgcccaaactactatttacattcccagatactgagagcaaatagcttttcatggccttgcatatttgggggcccttttctctgtcccgaccccaggtgcggatggaactagaaatgattcttctgtgagaaaagagtcctggacacggagtagtgtgtttcacaactgcggtggaacacaagtagattcccaagtcactgctgtgtgaggactgagtgaggttcccgaaaaattctgtcttgagtccatgttatcttgatttttaaaattgatagggaagaaaccccacaaactgtcaagcaagttatatgacaactaacaacattgcactttctgtatatgaaatcaatatttaaataacttatttttctccattgctattcttaaacattgtaagtagctgtaatataccaataccaatacgttcttgcaattgcttcagcccgagaaagctgtgtattgttttaaaattgtaaaaaaaaaaaaaaatattgtgatgatccatttaaaaaaaaaaaaaaggaaggtagacagaagggttttcctgtgtatcaaaacttgtctataattatgtcacctatgtacctaggggaaaggtaaataaaatgtcttcatcg

SEQ ID NO: 67 - DNA, 4417 bp, Mus musculus
gagtacaggtgaaagggtggcggccagagggagttcccaccggttgaattcttaaagtcatgaagactcaagaaaaataacaaggagtggccgattcgagtcttttggacttgcccagagctccaccctcggacagaggaaaagcccctggggacccaggcgggagcatcagacaagcgcgagaaaagcgcctgtgtgcgcgctccacctctgcgcagcgggtgcggggcggtgacctgtcccttgagctggccatggcggctgtgggatctatgcgctccgggagccctgccttcggcctgggacacctgttgacccttgcgatccttgcacttgcctctgatgcctgtaaagaagtcgtcctccaggtcccctctgaactacctgccgagaaatttgttggcagagtgaacctgatggactgccttaaatcagcagacatagttcatctgagtgatcctgacttccaagtcttagaagatggttctgtgtacacaaccagttctgttgttttgtcctcggggcaaagaagctttactatatggctttttagcacagacagccaagaagaaagggagatatctgtccatttagagggcccagtagaggtactaaataaaagaccgcatacagagaaggttctcagccgtgccaagagaagatgggctcctatcccttgttccatgctagagaattcattgggtcccttcccacttttccttcaacagatccagtctgacacagctcaaaactataccatatactattccatcagaggtccaggagttgataaagaacctctaaacttattttatgtggaaagagatactggaaacctgtattgcactggtcgtgtagatcgtgagcagtatgagtcctttgagctgactgcatttgcaacaactccagatgggtatacgccagagtacccactgccgctcctcattaaaatagaggacgagaacgataattacccgatctttacacagaaactgtacagcttcacagttcaggaaaatagtcgcattggttctattgtgggggaggtctgtgcaaccgacctggatgagccagacacaatgcacactcgcctgaggtactccatcctggagcagtcgccttctccacccatgctatttactatgcatcccagcactggtgtgatcactaccacgtcggctcagctggacagagagttaattgacaagtaccagttgctaataaaagtccaggatatggatggccagtattttggtttgcacacaacagcaaagtgcatcattactattgaagatgtgaatgacaacctgcccacgttcactcgcactacgtatgtgacatcagtggaagaaaatacagttaatgtggaaatcttgcgacttactgttcaggataaagatttagttaactcacctaattggagagctaattacaccattttgaagggcaatgaaaatggaaattttaaaatcgtaacagatcctaaaaccaatgaaggcattctgtgtgtgattaagcctctggactatgaagaacggcaacaggtgaccctgcaaattggagtagttaatgaagctccatacactagagaggctagctcaaagtcacccatgagcacagccacagtgactgtcaccgtgacaaatcaggatgagggccccgagtgtatccctccaatgcaaactgtgaggattcaagaaaatgtaccagttgggactagaaatgatggatataaggcatatgacccagagaccagaagcagcagtggcataaggtacagaaagttaagtgacccaagagggtgggtcactgttaatgaagattcaggatcgatcactattttccgagcgttggatcgagaggctgagactgtcagaaatggcatttacaatattacagtccttgcgttagatgcagatgggagaagctgtactggaactctgggaatcatacttgaagatgtgaatgataatggcccattcatacccaagcagacagtggtgatatgcaaggctaccatgtcctctgctgaaattgttgcagttgatctcgatgatccagtgaatggcccaccatttgatttcagtttggagagctctgattcggaagttcagaggatgtggaggctaacaagaatcaatgatacagcagctcgtctttcctatcagaacgacccttcatttggatcctatgcagttcccattcgagttacagacagacttggtctgtcctcagtaaccacattgaatgtccttgtatgtgactgcattactgaaagtgactgcacactccgctctggagaaaggactggctatgctgatgtgagacttggaccatgggccatccttgctatactgttgggcatagccttgctattttgtatcctgtttacattagtctgtagtgtttcccgggcatcaaaacaacagaaaattcttcctgatgacttagctcaacagaacctaattgtatcaaacaccgaggctcctggagatgacaaagtttattccacaaacggcttgacaactcaaactatgggagcttctgggcagacagctttcaccaccatgggaactggagtcaaaagtggagggcaagagaccattgagatggtaaaaggagggcagcagactttggactcacgcagaggggctggctatcatcaccataccctggatccttgcaggggaggacatgtggaggtggacaactacagacacacttactcagagtggtacaatttcattcagccccgacttggtgatgaaaccattagaggacacactctgattaaaaattaaacaataaaagaaggtacagttttgccatacggatgacaaccagaagcttgctcaagactacgtcctcacatacaactatgagggaaaaggctcggctgctggctctgtgggttgctgtagtgacctacaggaagaagacgggcttgagtttttggaccatctggagcccaaatttaggacattggcagaagtatgtgcaaagaggtgaacgacttctaataggaaaacgaaaactaatggattcactgccttgccctccctgcttttcactgtaaaccaggagttttcaaaaaacagaagatgttatatttggggctccctctcctatctcggtctgcagaatctccatgcaaatgcacatttacagagaaactttgcaattagtacttgaaaaccattatgcatggatttcaattacttcttttttaccagatgacatcttaggtggaaacttaaggaaatttgcattactgtttacattgggtataatgacagcagccaacttatagtgcaataaagttgaatggatttgagtctattatagactattgactataacccaattggagactgtagacaccattatctccagttaatggattaactggttgttcatacggtgcttggaaacagttgttttcctaaacattctaaactgtatatgctgtgccttgctttagttatattcttgtaatatggcctggcttcatagtacaaaggtagattgccaggcagcctttgagtgtgcttgaaattccaatccagtgggtgttagcttctgttctgtgtaaaatcctgccctgaatcacaatctcttttgtaccaactttgtcagttaaatttagttttcaaaacttctttataatgtgttctgtttttctaaaagttttgtctgtgaacaccaaatgctctaaactcccatcttctctatttttaatttttttttcattttctctcctgtttgactttgcaaggtctgcttccaagatattcctaaaacttatcttttctcataaaatagttggtgtgtatgcatatcattgttggttttcttaagctcaatataatagcaacattattgttttggattttttggtaattattgcttcatttttgtccttagtaaagaacttttaattttcccagtgaaactatgggactctttcataatctttttgaagcaatgttcttcgtgacagaagcaatagtgtatttagaagtaggttgtggcaatctaatatagaatagcatagttacaatttccatctttaattcagggaccctggaagtgggaagtagtgatagagtttagactaagcatctcagcataataatctcaaacaatctctaggataatgccttctccagtgttttagatgatatggctagttataattgcattgttgtaaaattagttttagaagcagtttgtaattatagttattttatgaaatataggaaatgggccaagcaatttaaaattttttagaaatttacacacaagtaaacttcataccacaggacacactcccttcaatcagtgagctcagcacttaacctagatggatggatattctaggttggataattggtgcaatatagatatgtgtgattgt

SEQ ID NO: 68 - DNA, 3720 bp, Mus musculus
ccgaaaagcaagttctggccttctgcagttaatgcttttttacccatcagcaagatgcaccaagatgagacttagaggtgctgcacagaagcaggaaaaggaaccagctgctcctatatataggtctggagcacttcattagaaggcagaggaagaggttgcctggagagtggctgcagccctgctttgagcgctttgacacagcagacagttacacagcagtcatgagtacaacgagtaaggagtcactggagagcaatctgcgacagctaaaatgccatttcacctggaacctgatagcagaagatgagtccttggatgagtttgaggacagggtgtttaacaaggatgagtttcagaacagtgagtttaaagccaccatgtgcaacatactggcctatgtaaagcactgcagaggtctaaatgaggcagcactgcaatgcttaggggaagctgagggcttcatccagcaacagcatcctgaccaagtagaaatcagaagtctggtcacctggggaaactatgcttgggtctactatcacatgggccagttctcaaaggctcaggcttatctggataaagtgaaacaggtctgcaagaagttttccagcccctacaggattgagaatcctgctcttgactgtgaggaggggtgggcccgattaaagtgtaccaagaaccaaaacgagagagtgaaggtgtgtttccagaaggctctggaaaaggacccgaagaacccagaattcacctctggatgggccattgcgaactaccgtctggatgactggccagcaaggaattactgcattgactctctggagcaagccattcaactgtctcctgacaacacttatgttaaagtcctcttggcactgaagcttgacgcggtacataaaaaccaagcaatggcgctggttgaagaagccttaaagaaagacccaagtgcaatagatacactcctcagggcagccaggttttattgcaaggtatatgacacagacagagctatacagttgcttagaaaggctttggaaaagctgccaaacaacgcctatgtgcattactatatggggtgctgttataggtcaaaagtccatcatatgttgaacagaagggaaatggtatttagtggggataggaagaagttagaggaactaatacaactggcagtgaatcacttacggaaagcagaggaaatcaaggagatgcttgaatattcctgtagcttccttgctgatctttatatcatagcaaaaaagtatgacgaagccgattactacttccagaaagaattgagcaaggacctccctcctggccctaaacagttactccaccttcggtatggcaactttcagttttttcaaatgaagcgtcaagacaaggctatctaccattatatggagggtgtgaaaataaagaagaaaacaatcccccaaaaaaagatgagagagaaacttcaaagaattgccctaaggcggcttcatgaagatgagtctgattctgaggccttgcatatcttggcatttcttcaggagaatggaggaggtcagcaagctgataaagactctgagaggggagtggactctgcaaaccaggtaccttcagcatctttggatgaagcaggtgctgaatactagtgatgtggtacccggcctactgctggaaggaaaaagaaagccctcaccaagctgccattcaaaatacttaaccacttcctggatcaagaatgggctatcatactgactatagtatttgtcaggagtttggggaactctgctatcagattctagcacctgagtttctggatcgtgggatggtctgggagagggaccagatgaggtgatagatacaggatcttggcaaacagcctagagctctttcaattttttttggaaaaatagtttccacagtagtaaattctttaatcacacccacccctcagtggaggcttgtcttgggcttgtttcagtatttgtataaagcagccaaattcctcacatgggtgaatgttccatccttgaattattttagatattgcacagcattttcttcatagataatagtgtccatcaaaaagctgaggagtcagagactgtggctcaggactgtaatcctagcacttggaatctgagacaggaggattacagtgaacttgaggtcagcctgagcatgacctggaagggatggtgggaggtgagaattatatgtataaatattaatgattatgtacattaccttgttagtttgggtgagtatatgtctatataaccactatcacatatatctaaaaatacagaagggagaggttttgctttattgaataactttaagacttaccaaataatgttcaatattaattgagctcaaaatataaattgaatagtgagtcccaggtctggaagggatggtgggaggtgagaattaaatgtgtaaatattaatgattatgtacattaccttgttagtttgggtgagtatatgtctatataaccactactatcacatatatataaaaacacagaagggagaggttttgctttattgaataactttaagacttaccaaataatgttcaatattaattgagctcaaaatagaaattgaatagtgagtcccaggtctaaaaacaaacaacaaaagttgtgggaccaagtcattcctccaattaccagccagttctcaatctatggtgtcccacacacatgagttcaactgttccattagctcaggtggcagcaggattcgaaaaactgaggacagggtgagtcagaagggtcacatctgtgcaaagcagtagactcaggcagccacaccagacttccaggagtcgcatgggaagatgtctccctactctgccctcctagaactatatagttgtaggaaaagaagggagattctgtctaccaccatgacaattcatataaacatttatttcaagagtatggaaacaccagtggggatgaagggattgctgatttatacgcgatgattataaactcatgaggaaaaagtttatagtcactgttaggaagatttctctgtcaaataaataatttattcagaaatgctataaagaaatgccaggaagacagctgcctagaaggataacttggattgatgcttgggtcaagggactttgaaaatgtcatgggtactggagttgagttgttttattccatgtgaaatgtgtcacaccaagggatataaataatttttataactctgaaaaaaaatacagaaacaccacaaacttgataattgccatttcctaggtagatctggaagggcctaaatgttaaggttggtgtgaattgacagagtcaagtggcccagtatgagacggtcagccacactctgggataaaaaaatgtttctctactgggttcagcttgtctctatgtatatatgaacattttattcagcaattaaaacatccatgattcatagattgttaaaactaaacattctaacagctgtatcagtgcttcataatattttaaaaatgaaaatattctctatgcattaagtccatcgatattcaccatttgaatttctggaaaaataataaactttgtttataagtaacacataatgtaacattaagctatgctctggttcccctgaactttactgtaccttcgtatttttagactcaagtactgataataaagagtgcattaactgttaaaaaaaaaaaaaaaaaaaaaaaaaaaaaaaaaaa

SEQ ID NO: 69 - DNA, 3185 bp, Mus musculus
aagaggtaatccgagagccacgtgaggttgtgctacgtcatcaccaggcacgcgcgggggaacatggcggcggcgggtgttgtgagcgggaagattatatatgaacaagaaggagtatatattcactcatcttgcggaaaggcaaatgaccaagacagcttgatttcaggaatattgcgtgttttagaaaaggatgctgaagtaatagtggactggagaccattggatgatgcattagattcttccagtattctgtgtgctggaaaggactccagctcagtcgtagagtggactcaggctccaaaggaaagagctcatcgggggtcggaccagcagagcagctatgaagcggagtgggacatggttactacagtgtcctttaagaagaaaccacacaccaatggagatgctccaggccataggaacgggaaaagcaaatggtcgttcctgttcagcctggcagacctgaagtcagtcaagcagagcaaggagggcatgggctggtcgtacctggtcttctgcctgaaggatgacgtcatgctgcctgccctgcacttccatcaaggagacagcaaactgctgatcgagtctcttgagaaatacgtggtattgtgtgagtcaccacaagatagtagaacacttctagtcaattgtcagaataagagtctctcacagtcttttgaaaatcttcttgatgaaccagcatatggcttaacacaaaaaattaaaaaggatccttatacagcaaccatggtaggattttccaaagttacaaactacatttttgacagtttgcgaggcagcgatccctctacacatcaacgaccaccttcagaaatggcagattttcttagtgacgctatcccaggactcaagataaaccagcaagaagagccaggatttgaagtcatcactagaattgatttgggagagcgacctgttgtgcaaaggcgggagccagtgtccctggaagaatggaacaagagccttgaccctgaaggaagactcgtagccgtggagagcatgaagcaaaagatattcagagggggtcttagtcattcattaagaaagcaagcatggaaatttctcctgggttattttccttgggatagtaccaaagaggaaagaactcagttacaaaaacaaaaaactgatgagtacttcaggatgaaactgcagtggaagtctgtcagtgaggctcaggagaagagaaactcacgcctgagagactacagaagtctgatcgagaaagatgtcaacagaacagatcgaacgaacaagttttatgaaggccaagataacccagggctgattctgcttcacgacattttgatgacctactgtatgtatgactttgatttaggatatgtacaaggaatgagcgacttactttccccacttttgtatgtgatggagaatgaagtggatgccttttggtgctttgcctcttacatggaccagatgcatcaaaattttgaagaacaaatgcagggcatgaagacgcagttaatccagttgagtaccttactcaggttactggacagtggattttgtagctatttagaatcccaggactctggatatctatatttttgcttcagatggcttttaatcagatttaaaagggaatttagttttctagatatacttcgattatgggaggtaatgtggactgaactgccctgtaagaattttcatcttcttctgtgttgtgccatcctggaatcagaaaagcaacagataatggcaaagcactatggcttcaatgaaatccttaagcacatcaatgagttgtccatgaagattgatgtggaagatatactctgtaaagcagaagcaatttccctacagatggcacaatgcaaggaattgccacaagcagtttgtgagatcctgggacttcaggacaatgaaattacaacgccagattccgacactgatgaaaatgttggcagcccttgtcctgtatctgcgtttccaagtagcaccttgcccatccttgctgccagtgaagccaaagatgacagtccaacacagacattagcatccccgaatgcctgcagattaacacctgcatgatcatttgtcttacagtttttgagatactttgttgcaattcctttttaagtacatgaaagatagacattcacggtcttggtattgatcatgctttaagttttatggagagacagtgtactgatgttcttgcattaaagctttacaaagttttaaactaattatttttgtagttacttctaccaaatagcctttccttttcaataacattccttagtatttttatagccaagcacattttattttgttgctgatgaactgggattggataaatacttcaagtggaagctttggaaattatgcacttggaaaagcactcactgtttattctttagagggctttggacttgattacattaaatgttgagcctttataaagcattctaagctgagaagtacattgttactcagagatgaaatttaaaatacaaatttggcttttctattgtttacaacaatattcagcttaactatttatgctggttgaatgtgatttaaataagacatttttaccaacgtagttaaacgtgtggataaagaactgtttcaaccttagcaactggattggcagtctgggttttttacaaagaacttttcttcacttgtatataggctatatatatgtactatttatgagtataagaaagcatagtcctattttctttaactgaataaacttgactattgatttatataagctgattcaacaaaattaatacatggcttcaatataagatctttttcaaaactattttcttaactgaacatttatttaatgagactacattgagccctgtctatacctggtataaatcactgtaacctctttactaataatgtttattatctttcctaatactgcactaattggttaatcagatcgttacatttttaaaaatattctttgcaaaaagcttatgtcagaagtttccaggcactgtcatgagtcggaaaggaatatttttttgtatatgaatgaagctgtttttaccatgcagtgttgcatgtttttaagttctgtggaattgccataacaaattccgttttaattgtaatttgttaactcttgtacatatcattaaatgaaatcaaagctaaaaaaaaaaaag

SEQ ID NO: 70 - DNA, 4407 bp, Mus musculus
gcgcgggtagaaaacgggatgcctcaggcgccgggaccggctttctgcctctaggagccagcgactgctgctgagcaagactcctgttccggagcggagtaacctgcctgtgcccgctgcgacgcgcgcccacctcccggggaaggaacggcgaggcccggggccgtctccgcgatggagcgcggggccgcggcggcggcatggatgctgctgctggcgatcgctgcctgcctggcgccagtcagtggccaagaatgtggcagtgggaattttcgctgtgacaacggatactgtatccctgcatcctggaggtgtgatgggaccagagactgtttggatgacactgatgaaattggctgtcctcccaggtcctgcggttcaggctttttcctgtgtcctgccgaaggcacctgcatccctagctcctgggtgtgtgaccaggataaggattgttccgatggtgcagatgaacagcaaaattgccctgggaccacgtgctcaagccagcagctgacgtgctccaatggtcagtgtgttcccatcgagtacaggtgtgaccatgtcagtgactgccccgatggctctgacgagagaaactgctattatccaacatgtgatcaacttacttgtgccaacggagcctgctataacacgagtcagaagtgtgaccacaaagttgactgcagggactcctctgacgaagctaactgcactacgctgtgttcgcaaaaagaattccaatgtggcagtggagagtgcatccttcgtgcctatgtctgtgaccatgacaatgactgtgaagataacagcgatgagcacaattgcaactatgacacctgcggaggccaccagttcacttgctccaatggccagtgcattaaccagaactgggtttgtgatggggacgatgattgccaggattctggtgatgaggatggctgtgaaagtaaccaacgtcatcatacatgttacccaagagaatgggcgtgtcctgggtctggacgatgcatctcaatggataaagtttgtgatggagttcccgactgtccagaaggagaggatgagaacaatgccacaagtggacgatactgtggtacgggtctctgctctatcttaaactgtgagtaccaatgccatcagacgccatatggaggagaatgcttctgcccgccaggtcatattatcaacagcaatgacagccgtacttgcattgatttcgatgactgccagatatggggaatttgtgaccagaagtgtgagagccgacagggccgtcaccagtgcctctgtgaagaaggttatatcctggagcgcgggcagcattgcaaatccaacgactccttcagtgcggcctccattatcttctctaatggtcgggatttgctagttggagatcttcatggaagaaacttccggattctagcagagtctaagaaccgtggaatagttatgggagtggattttcactatcagaagcacagagttttttggacagaccccatgcaggcgaaggttttttccactgacattaatggcttaaatacccaagaaattcttaatgtttctattgatgctccagagaatctggctgtggattggattaataataaactttatctggtagagacaagagtcaaccgcattgatgtggtcaacttggagggaaatcagcgtgttactctcataactgaaaacttggggcatcctagaggaattgcccttgatccaactgtgggctatttgtttttctcagattggggaagcctctctgggcaacccaaggtggagagagccttcatggatggtagcaatcggaaagacctggtaacgaccaaattggggtggcctgctgggatcactctggatcttgtatccaagcgagtttactgggtggactctcgttatgactacattgaaactgtaacatatgatggaattcaaaggaagacggtagcgcgtggaggctccctcgtccctcatccgtttggaataagcttatttgaggagcacgtgttctttactgattggacaaagatggcggtgatgaaggcaaacaagttcacagacaccaaccctcaagtgtaccaccagtcttccctgacgcctttcggagtgacagtttaccatgccctcaggcagcccaatgccaccaatccgtgcggaaacaacaatgggggctgtgcgcagatctgtgttcttagtcacaggacggataatggcggcctgggctaccggtgcaagtgtgaatttggctttgaactggatgcagatgagcaccactgtgttgccgttaagaacttcctgctcttctcatcacaaacggctgtgcgtgggatcccattcaccctctccacccaggaagatgtcatggttcctgttacagggagtccttccttctttgttggaattgactttgatgctcaacacagtaccatcttctactcagatttgtcgaaaaacataatttatcaacaaaaaattgatggcacaggaaaagaagtcatcacagcaaacaggttgcaaaatgttgagtgtctgtcctttgactggatctcaaggaatctctactggacagatggagggtcgaagagtgtcactgtcatgaagctggctgataagtcccgacgacagataatcagcaacttaaacaaccctcgatccattgtggtgcatcccgctgctgggtatatgttcctgagtgattggttccgtcctgcaaagattatgagagcatggagcgatggatctcacctaatgcccatagtcaacactagtctggggtggcccaatggcttggccatcgattggagtacttcccggttgtactgggtggatgccttttttgataagattgagcacagcaaccttgatggtttagacaggaaaagactgggccatgttgaccagatgacacatccgtttggactcaccgtttttaaagataacgtgttcttaacagactggagactgggtgcgattattcgggtcaggaagtctgatggtggtgatatgaccgttgttcgacgtggcatcagcagcataatgcacgtgaaagcgtacgatgctgacctccagaccggaactaactactgcagtcagaccacccatcccaacggcgactgcagccatttctgcttcccagttccaaacttccagcgggtgtgtggctgcccctatggaatgaagcttcagagggaccaaatgacttgtgagggagacccagcccgagagccccccacacagcagtgtggctcctcttcctttccctgcaacaatggcaagtgtgtgcccagtatcttccgctgtgatggagtggatgattgccatgacaacagtgatgagcatcagtgtggggcacttaataacacctgctcatcttcggcttttacttgtgtccacggtggacagtgcatccctggccagtggcgctgtgacaaacagaatgactgtctagatggcagtgatgagcaaaactgccccactcgttcaccgtcgtctacttgcccgcccacctccttcacctgcgacaatcacatgtgtatccccaaagagtgggtctgtgacacagacaatgattgttcggatggatcagatgaaaagaactgtcaagcttcggggacctgccaccctacccagtttcgctgccctgaccaccggtgtatcagcccactgtatgtctgtgatggggacaaggactgtgttgatggctcggatgaggcaggctgtgtgttaaactgcacaagctctcagttcaagtgtgctgacgggagttcttgcattaatagcaggtaccgctgtgatggggtgtacgattgcaaggacaactctgatgaggcgggctgtccgaccaggcctcctggtatgtgccacccagatgagtttcagtgccagggagatggtacctgcatccctaacacctgggagtgtgatgggcacccggactgtatccagggctcggatgaacacaacggctgtgttcctaagacctgctccccgtctcatttcctctgtgacaatggaaactgcatctacaactcgtgggtctgtgatggggacaatgattgcagggacatgagtgatgagaaggactgtcctacccagccttttcactgtcctagctcacagtggcagtgcccaggctacagcatctgtgtcaatctgagcgccctgtgtgacggcgtctttgactgtcccaatgggaccgatgagtccccgctttgcagtaagttccctgatcacagtttgctggacacaaatttattctgaacagtagatggctgtaccccagcactgtcacagaccccatatagtattttgggaaggggatttttagttcctctgtgactttatatccctgtaggagtaactataaattccaataaatgatgactgcataacacttctcat

SEQ ID NO: 71 - DNA, 1152 bp, Mus musculus
gtcaacacgtgatcaagtggagaaacggtctggcgcgagtgtctgtgacgccatctcggcgcgactcttcattttctgggagttttctggctgctctgccggagctatgccgaaagtcgtgtcgcggtcggtggtctgctcagacacccgggaccgcgaggaatatgatgatggcgagaagcccctccatgtctactactgtttatgtggccagatggtcctggtgctggattgccagttagagaaattgcccatgaggccccgggaccggtctcgcgtgatcgatgctgccaaacatgctcacaagttttgtaacacagaagatgaggagactacttatcttcggaggcctgagggcattgaacgtcagtacaggaagaagtgtgcaaagtgtggactgccgctcttctaccaatcccagccgaagaatgctcctgtgaccttcattgtggatggagcagtagtgaaatttggccaaggctttgggaaaaccaatatatatactcagaaacaagagcctcctaagaaggttatgatgaccaaaaggactaaagacatgggcaagttcagctctgttactgtgtctaccattgatgaagaagaagaggagatagaggctagggaagttgctgactcttacgcgcagaatgccaaagtgattgaaaagcagctggagcgcaaaggcatgagcaagaggaggctgcaggagttggttgcaggcatgctgctgtaccccgtgtctcgggaggctggcagaagtgctgaccgggctccattcgctcttggcatcagcctgagaacatcctgtgcagctgagagggtggtgatccctctgtgtaatacacaggatggaaagtgaccagggtgaggacacagatattaaagggtcaataatgctcagaaaggaaaggctcaaacctcaatagaaatcagaaaccgttcgccggctgccaagacctgcccaacacacacatcccaggattcacacagccttctagcacatgcctttgccaatgcttccagggcatctggaagagtggaggcctgagatgaggtctccagaaaggcatgactctgcattttagtgtctagaacccggattcccattgtctttatgcttgtaaataataatgattaaagtgatgtgaaatc

SEQ ID NO: 72 - DNA, 2613 bp, Mus musculus
gtttagcagcccccagccagtgacaggttccattcaccctcgttgcccttctccccacgacccttttccagaggcgactagatccctccgtttcatcccgcacgccatggacaagttttggtggcacacagcttggggactttgcctcttgcagttgagcctggcacatccacatcagcagatcgatttgaatgtaacctgccgctacgcaggtgtattccatgtggagaaaaatggccgctacagtatctcccggactgaggcagctgacctctgccaggctttcaacagtaccttacccaccatggaccaaatgaagttggccctgagcaagggttttgaaacatgcaggtatgggttcatagaaggaaatgtggtaattccgaggattcatcccaacgctatctgtgcagccaaccacacaggagtatatatcctcgtcacgtccaacacctcccactatgacacatattgcttcaatgcctcagcccctcctgaagaagactgtacatcagtcacagacctacccaattccttcgatggacccgttaccataactattgtcaaccgtgatggtacacgctacagcaagaagggcgagtatagaacacaccaagaagacatcgatgcttcaaacattatagatgacgatgtcagcagcggctccaccatcgagaagagcaccccagaaggctacattttgcacacctaccttcctactgaacagcctactggagatcaggatgactccttctttatccggagcaccttggccaccattgcctcaactgtgcactcaaaaagccatgcagcagctcagaaacaaaataattggatatggtcttggtttggtaattcacagtccacaactcagactcaggagcccacaacgagtgcaactacagccttgatgaccacccctgaaacaccacccaagaggcaagaagcccagaactggttttcatggttatttcaaccatcagagtccaagagtcatcttcatacaacaacgaagatgcctggtacggagtcaaataccaacccaacaggctgggagccaaatgaggaaaatgaagatgaaacagacaaataccccagtttttctggatcaggcattgatgatgatgaagattttatctccagtaccattgcaactactccacgggtttctgcccgcacagaagacaaccaggactggacccagtggaagccaaaccattcaaacccggaagtactacttcagacaaccaccaggatggctgatatagacagaatcagcaccagtgctcatggagaaaattggaccccggaaccacagcctcctttcaataaccatgagtatcaggatgaagaggagaccccacatgctacaagcacaactcctaatagtacagcagaagcagcagctacccagcaggagacgtggtttcagaacggatggcaggggaagaacccccctaccccaagtgaagactcccatgtgacagaagggacaactgcttcggcccacaacaaccatccaagtcaaagaataacaacacagagtcaagaggatgtttcctggacagatttcttcgacccaatctcacatccaatgggacaaggtcatcaaacagaaagcaaggatacagactccagtcatagtacaacccttcagcctactgcagctccaaatacccatttggtggaagacttgaacaggacaggaccactttcagtgacaactccacagagtcattctcagaacttctctacattacatggagagccggaagaagacgaaaaccatccaacaacttctattctgccatctagcactaagagcggcgctaaagatgcaagaagaggtggaagtcttcccacagatacaactacttctgtagaaggctacacctttcaatacccagacacaatggaaaatgggactctcttcccagtgacccctgctaaaactgaggtctttggagaaactgaagtgactcttgctactgactccaacgttaatgttgatggctccttaccaggagatcgagactcatccaaggactccagggggagttcccgcactgtgactcatggatccgaattagctggacactcaagtgcgaaccaggacagtggagtgaccacaacttctggtcctatgaggagacctcagattccagaatggctcatcatcttggcatctctcctggcactggctctgattcttgccgtctgcatcgcggtcaatagtaggagaaggtgtgggcagaagaaaaagctggtgatcaacggtggcaatgggacagtggaagacaggaaacccagtgagctcaacggggaggccagcaagtctcaggaaatggtgcatttggtgaacaaggaaccatcagagaccccagaccagtgtatgacagctgacgagacccggaatctgcagagtgtggacatgaagattggggtgtagtgccctacgccattaacttgaaaagacagcacgattggagacgtcattcctgggagctgggaccctccacagatgcaatgtgctactgactattattactggggattatgtttagcataaaattttctattccttttttaaaaaaaaaaaaaaaaaaaaaaaaa

SEQ ID NO: 73 - DNA, 3767 bp, Mus musculus
ccacgcgtccgcccacgcgtccggttccgtgagaagttctcaatttttttcagcaatgagtcaagtggcagcggaaagtacggccggcctggaccagcaatttgttggtcttgacctgaaatcatcagataatcagaatggaggaggaaatacagagagcaaagggcgctatatacctcctcacttaaggaacagagaaacatctaaaggggtctgtgataaggacagttcaggatggagctgtagtaaagataaagatgcctacagcagttttggatctcgtgattccagagggaagcccaattatttcagtgatcgtggaagtggatccaggggaaggttcgatgatcatggtcgaaatgactatgatggtattggtggtcgtgaccgaactggatttggcaaatttgaacggagtggtcatagtcgttggagtgacagatcagatgaagatgactggtcaaaaccacttccaccaagtgaacgcttagagcaagaacttttttctggaggaaacacagggattaactttgagaaatatgatgatataccagtagaagcaactggaaataattgtcctcctcacattgaaaatttcagtgatattgagatgggagaaattatcatggggaacattgaacttactcgttacactcgtcctactccagtgcaaaaacatgctattccaattattaaagaaaaaagggacttaatggcttgtgctcaaacagggtctggaaaaactgctgcatttctactacccattctcagtcagatttatacagatggtccaggagaggctttgaaggctatgaaggaaaatggaagatatggtcgccgtaaacaatacccaatctccttggtgttagccccaacaagagaattggctgtgcagatctatgaggaagccagaaaattttcataccgatctagagtccgtccttgtgtagtgtatggtggtgctgatactgttcagcagattcgggacttagaacgtggatgccacttgttagttgccacaccaggacgtctagtggacatgatggaaagaggaaagattggattagatttctgcaaatacttagtattggatgaagctgataggatgctggatatgggatttgaacctcaaatacgtcgtatagttgagcaggacacaatgccaccaaagggggttcgtcacactatgatgtttagtgctacttttcctaaggagatacagatgcttgctcgtgactttttagatgaatatatctttctggctgtaggcagagtaggatctacttctgagaacatcacacagaaagtagtatgggttgaagaactagacaaacggtcatttttacttgatctcttaaatgcaacagggaaggattcattgactttagtatttgtggagactaaaaagggtgcagattcgctggagaacttcttatttcaagaaagatatgcgtgtactagtattcatggagacagatcacagaaagatcgagaggaggcccttcaccagtttcgctcagggcgaaagccaattttagtggctacagctgtggcagcaagaggtctagacatttcaaatgtgaaacatgttatcaattttgatttgccaagcgatattgaagaatatgtgcatcgaattggccgcacaggacgtgtaggaaaccttggacttgccacctcttttttcaatgagaggaatttgaacatcacaaaagatttgttagatctccttgttgaggctaaacaagaagtgccttcttggttggaaagtatggcttatgaacaccactacaagggaagtagccgtggacgttctaaaagcagattcagtggaggatttggagccagagactatcgacagagcagtggttctgcaaatgctggatttaatagtaaccgtgccaatagcagccgaagtagtggtagtagccacaacagaggatttggtggaggtggctatggaggtttctacaataatgatggttatggaggaaattataactcccaggcagttgactggtggggcaattgaatttgtatcattatttcatacagctaatatggaaaccacatgtaacttagccagactgtattgtgtagcttcaagaacttgcagtacattaccagctgtgattcttctaaaagttcatgagagctcaaagtcacaagaaattaagcaacaacctgtagccctattcaaagttgatgagaaaaatttttgtaactggattaattcacttcctgcttggttgtaccctaaacagcatttataatttgtgagtgaggatcatttgttaatgtactatgacttttaactttaaacaacttatttaatgtcctgttgtctcaataatgctcaagatataaattgttttaataagttaattgaattttggctacaagcaaaccttggcacacaagtgtaatacaccttaataggaatcaattcattgctaagtatgatggtgaatgaacttatcctggataataaatttttggtatatgcagagttgttggtaaaacttcttttttaagtttgtaatgtggcagacatacaaaactaaagttctgaactgctcactatatcctgcattgacacttagaaccttaaagtattaaatatatggttatatatggttatatcctttattttcaaaagcactaatgcagataactacagtgattcctcatttactgttttaagtaatttatattggcatactcctacatgaaagtttaaaattttggtgaagaatttgggatataaagtttaggtatatttaatgcctgccatgcataaaaaatgataaattactaggtgactatggcaatgaccagaccttattaaagctttgttaattctggtctttaatgcatgctagtgttggtgttttttggtcaagagagtatgaacagattatgcagcagcaggctttacttttacacagtcaggtttttctgtaacaactatgttgaaatgtaaaaataaaataaaataaaatataaaaggcttacatacatactatgtaaatataagaataaaaaattgaaattgctgagatctcacaggttggatttatgtactaattatacatgatggtcagtacagtgcagttttcatctattttcgttgcataggtttccattgtattatagtcatattttaattggccaaaaatgattgtccctcacaaaaaatgccttttcctttgagaatttcctggaaagaatacaataaatttaaaaacgtaagtccttaaaaatactataagttgataaatttttctaaaagtgcaatagattttcaagtgtattgtgccttgtattaaaattttaaagtaggtgtacttgacagtattatcaaggtcatttgttacggtgctatttcaattatagaagtttagactgtacattttgcccataactttttacaaagtacttattttattgcacatgaagagaattttatatgtgtatcttatgtacaagtccttgaagttccaattggatattgttgattacagtgtgtcaagaacttggttcagaaaattttccatggaccatagaatgatagttaagaaaaactatttgcagcctgaagtggtggcacacgcctttaattgcagcactcgggaggcagaggcaggtggatttctgaatttgtggccagcctgttctgcatagtgagttccaggacagctagggctctacagagaaaccttgtctcaaaaaaccaaaaaaaagaaaaaaacgaaaaaaaaaaaaaa

SEQ ID NO: 74 - DNA, 9405 bp, Mus musculus
cggctgggtgctgcttaaaggtggacggcggccagggttgccgcgtccagctcggtgccacgccccggccggtgctgcggaagcctcagccatgctgttctggcacacgcagcccgaacactacaaccagcacaactctggcagctacttgcgtgatgtgctggctctgcctatcttcaagcaggaagagccgcagctatctcctgagaatggggcccgcttgccgcccctacagtatgtgttgtgtgccgccacttctccagcggtgaggctacatgaagagaccttaacatacctcaatcaaggtcagtcgtatgaaatccggctgctggagaatcggaagctaggggacttccaagatctgaacacgaaatatgtgaagagcatcatccgtgtcgttttccatgaccgccggctgcagtacacagagtaccaacagttggagggttggcggtggagtcggcctggggaccgcatcctggacattgatattccactgtctgttggtatcttggaccccagggccagcccaacccagctgaatgctgtggagtttttgtgggacccatcgaagagagcatctgcattcattcaggtgcactgtatcagcacggaattcacccccaggaagcatgggggtgagaagggagtgccttttcgggtgcagattgacgcgtttaagcagaatgagaagtggggactacttggagcatctacacttttgccagcttgccaaatcaaggggttcaaagcccaaggggagctgatcggaaacaagaagactgaccgggaaaagatggaaaaaagaacggctcaagagaaggagaaataccagccttcctatgaaaccaccatccttaccgagtgttctccatggcctgacgtcccctaccaggcgaacacccccccatccccaagctacaatggctctcccaacagctttggcctccgtgaaggtaccagctcacctattcacccggtggagcccttacccctgggcagtgatcacctgctcccatcagcctctatccaggatgcacagcagtggctgcatcgaaaccgcttctcacaattctgctggctctttgccagcttctcaggtgctgacctcctgaagatgtccagagatgatttggtccaggtttgtggccctgcagatgggattcggctcttcaatgccatcaaaggcaggaatgtgaggccaaagatgaccatctatgtctgtcaggagctggagcaaaaccaactacccctgccacagaagcaggatgacagtggggataacagcctgtgtgtataccatgctatcttcctggaagagctgactaccctggagctgactgagaagatcgccagcctgtatagcatccccccacagcacatccaccgggtctatcgacagggtcccgctggcatccacgtggtggtaagcaatgagatggttcagaatttccaagatgagtcttgttttatcctcagcacattaaaagcagaaagcagtgatggctaccacatcatcctgaagtgtggactctgagcaagcagcgcctgcacctgtcccctggcccatcatggatccctggctgtgaaaggtgcaccactgtcagctgctgtctcacctgacaagctcagactaggagggactctacccagaccaggaaagctacagacaaccatggacacaaaagtctggtgacagaaaaaagccagggttcccttccctttcctcttgggttttaggttttaagtttctttttcttttcctggcaaaatatggggatgtgcattcttataactttacccctgcaaatggaggggtctttgatgaatggtcctccctgtctctctctcttatgcaccctattcctgttctttttcttgagtcacggcttcatgcctagctctgccattctcacaagggctccacacacagttctcctcctaatactgacttcctttctcaggaccctggtagccatgtctctcctgttcttggatgacttgataagactggagctatttatttgtgccttccatttctttctcagtcgccttgtctctaaggatctgctacattcaagcccagagtctctgcattgacatggtagatggcacagtgtacctatgtgacctctcattgtgtattagttccttttctgttgctgtgataagatactctgacaaaggcaacttgataaagaaagggcttgttttggcttagagttttgtagggattatggtggatattatggtgaggaaggtgccaaacagaaagctagctgatctcattttcatacacgtaggaagcagcacagagagaaagagcaagagcaggaaatggtacaagccttcaaggaccaccaaccccagtgacttacttcctccagcaagactgcatcctctaaaagccccataacctcagcagactacatcaccaactgggaccacgtgttcaaatacataagcccatgggatacatttttcattcaagccacacattttgcccatgtgacctcccacattttctagttagagatgctatggactaggagatgacatgtgacttcctcaccaggggaagagaggtgaggacagaatgattcctcatggaccactactgtgtattctcatttctgttgagcaaagagtactaagaggtgaagattctgttatccagtggccttgaccatccattctagacatttgggttggggtatgtctcagtagatccctccctggcaagtatgaggccctgggcaccatcccagcgctacagcaggaggtacttactgaattctctttttcagacaacctcagctaaccactgctgtttgccaagtggcccaggggtagtatggtgtttttttcattgctcatttaagattctatcataggtatatagataggtgctttgtctttgttggcatggttgaattgttcactttttttgtttgttttgtttttttcaagacagggtttctttgttagccctggctatcctggaactcactctgtagaccaagctggcctcgaaatccgcctgcctcggcctcccaagtgctgggattaaaggaatgtgccaccactgcctggcttgttcacctttcttaaactctgggggaaatttgaggatcagtagctatggtagactttaattcattctttaattatggcccacccagtgcttcaaactctttacctaatcctcaaagccatagcgagttactttctaagctcaaagatttgccaaagattttggcaaatattattttacaggcagaaaaacttactctcacaggaaagatgagctctcagttccttgtcttttgagacatgtgggtggggttgacagctttattgagatgttggtgtcgtgaatatattggcacaggctttctgtggacagggtttcatttttgggaatgtgcctggtagaaatggacagcttcataaggtaacttttcaccggtttgagaaactgcccagtgtttcccacgcagctacacgtgtttgtattaccaccagcaatggaggatggttctagtttctccacctcctcatcaacatttgctgtgatttctcattcttgcccgcctgtcctctctccctcccccttcttcttccgtatagtccagcctggcctcgaagtcactaagtagaagaggaaaattgaacttctgatcttcctgactctgcttcctaaatgctaacaacatagaaaagtacctccacacctaatgtatgcggtgctgggacaaaatccagggctttgtgcttgctaggcaagagctctctctaccagctgagccacctccctagtggtgacctgtcttttattacaatatcctgctggtgtcatgcatgtctctggctaatgatgttcaatgtctcttcacatggattggccatttgtatatctttgggaaaatgtctggttatgtcttgcctgtttttaaattgggctctcttcattgaattgtacaagttgttgatgaaaatccttcaccagtttttctccattctgctccattctgtaggctgtcttcaccctcttaatggttgatgctccttggggtgaacatgtttctaaattggttgtgcttagtagtatgaaccagcactcccagtactcagctgaggctcccgaggccagcccaacctacatagtaagacctagtctcagaaacaattgtcatcattattttaatgtgtgtgatgcctgagttaccttctgctgattgtagttttgatgtggatactaagaaaccatgacctaatgcaaactcaggaaaatctgtgttttctccttagaattaaaaacgctgtttatttttattttatgtgcattggtattttgcacattggtatagtatgtgtggttgtgtgtgtgtgtgtatatatatatatatgtatatgcacacatacacacagatccttgtgagggtgttagatcttctggaactggagttgcaagcaggtgtgagctgccatgtgggtgctgggaattgaagcttggtcctttggaagagaagccaatgctcctaacccctgaaccatctctcctggtccctcttaggaacatgattaaagttttagttggtacaaatgagttctggctccagtctgagttagttttacatatatgatatgtagtgggaagagtctagtttcatcctttttacatgtgaggggtctacttattttaacccctaattactgaaaggactgaagcttttgtagtctgaagcccctccgattcctggaatcttttgtggagcaccggcggggaccatttgctggatctcttggttcctttttacccttcttgggtcttggcatttggggtcttactgtctcttaacgggccaacttcccttcttttcttcctgtcaagcaaggactgggttgatgccctctcttgttctgttcgtttttcctgggcactaacacttcttagttctagaggaaggtaatgaccaaacgtttcccaaacgtttccatacttggatagagaggcaaccgagtctcttagaataatatgctcaaggcgagccactgggagaaacaggactcattgggcctctgactttcaggcccatcaggctatcttgtggcccctgttcccaaagtgatagctctacatgggctaaaggaaagagagactaaacttgatacctttttttttatctcataccaaagtcggtctaaactggagaagccaaagatggcacactgtaaaaagagcagatggcatggaatgttccaaagtcttgtcttggggtctgaattagttatttttctcattgttgtgaaaaacatctgacaaaaacaaaacaaaacaaacaaacaaacaaaacaaaacaaaacaaaacttacaggagtgagggtttctttctggctcacagtttaaaggtccagtttgtcgtggctgagaagtcttggcagccagaacatgggacaggggggagcagaggcagatggatacaatgtttatcttaccatctctgtttttttagtcagggtttctatttcctttacaaaacatcatgaccaagaaagcaacttggggaggaaagggtgtatttagcttacacttgcacattgcttgttcattcacccaaaggaagtcaggacaggaactcaaacaggttcaggaagccaggtagctgatgtcagaggcctgtggagggatgttcctttaactggctttgtttccttatatgaacacaggactaccagcccagaagatggttcccacccacaatgggcccttcccgcctttgaatcactaattgagaaaaattctggaatctcatggaggcatttcctcaggggaggctcctttccctgtgataactacagcttgtgtcaaactgacacacaaaactgctactatacctttttactctgcaaaacttcagccatgaaatgctagggtaggttttcccacctcagataactaatctagaagactcctcacacacttgcttggcaggggagagtccatgatcaaggagctggtctttcctgggtaatgcttattctttgcagtctggatgtgcttgactgagtaatttttggtagtgggggaatgtattcttgctcccgatgagtgaattaaaggaatagaaaagaaactcactggcagacatagtcagaggtttgttttccatggggataattagttcccatcaaagttgacattcaagattagcccattgtggggttttagaaaacagtcagacattgccctagtgacttcttacccagtctgcttggagccccttgagagctattaaccaggaaaaggttagaacccataagcacgtcaccagttcctaagtccagtgttgcttcaggggctggcccaagtagctggagttctgaaaattattaacacatcagtggaagaaatagaaagactctttagctgaattccgggtcagtggaaagttgaggttgttgggggcaaggggaattgaatatggtcactgccttaggtacactggagggacaggaccaaaagtcaagggtcccaggctccctttaatacaaggtgaacagtagaccattagtagagtgtccctgtgtttgaatggcagaactgcccccctaaaacaagaagcattgatctggagacctgagaacctggaaactagtcagtaggtgaatctgagcttcgggaaaactttaccattgtttcccattcatcaaagtcatgtggtggacaggtgacctttgcttgtcctcggtattcagtgccaccagtgctgctgcagctgcaggtaaacccgagtggatggatgcctgctcaccaagtcccaggctttccctgactgcagctgggtgagtgcaggtgtgtaagtgtgggcctcaatgatatgctgctatctgctgtcatccgagccagtctacttggccagtatagaatgttcttttctctttcctcttccaatctctttgtcctttgaagataggactactgggcccaaagagcagtgagactctaggaagtacccagactcctttcccaaggccagctctccttagctgcttctccgcctcagtaggagtctctgagcccctgcaggcactgctgtaaagggtctctaacctgggccttcaggctgttctaaggactggagtgaagaggtctgtgttcccttccttccaaagagtgccctccctttatatttgcagacaggaactaaactcagtgctgtccactggttttgccatccatttagttactagagagcattatctttcaaacctagttcagggaatgatagccttgccatcaaaaattacactaaattactgtattggattggcttgtgttaaattatgcaggactgtggtgggactcgatggccgagcacttgccaactgcgagcaaggttctgagttctatccctagtaccataaaaccaataacattgtggagagctgggtatggtggtgcaaacctgtaatcccagtactcagggcaatgctgtggccggggagtaaacgaagggtgactgagtctcaggccagtctggactattaaaagttgttttctcttgtgccaacatacttaattttacctctttgcccttaaatactgaaatatttactccccaactcctttttttttaacattttaatgtattttattgtcttatttgtcagtggtagggaacagacccagagttcagggcctcacacatgtgaggcaggtgttctaccactgagctagcccctaacctcagcagccttctctctccttaggaattccttaggtcacttatcatagcattgctcccccctatctttttttttttttttaaattaggtattttcctcatttacatttccaagggctatcttaacaatgcattttgcataaacttaggagaagtagaaggtgcaatcagaagtctggagagttccttgccttctgtgtatctcacttctggaaagttctgatcctcacttggctcccagggactatgcccagcctttccatgagagagagtacagaagtctcttcctcaaacgctcctgttacctggaaccctgctcggcctttgtcctggtcctctggtcagggtttgatagaagaaaggacttttgtgctgtatttatggattgccgagctgtagggggtagcagtggcctgaggcgcctactagaacctgcctggaaaggacagactgatttcagcaggtgtcttgaagactaaacccctgttagcttagcatccctggagcctacagacccctccccatatatgctagacccttcctgtgtggttgtgatttctgggcagcttcctgccttccctggacccagatttctacagtacttgtggggcagagtgtggtgttccccagggatgttcatctttcatagcttgtctatctgtagacgccccctcccctgtcttctgcatccccttgcatcctgcagccactccaaacctgtctatcctgtattcctcattgacctgcttctcatggagtttttatctcaagccctctgcccaggtttctagctggggaaaccattgaaaaatgagagacagactgggtcctaaaaggtctacgggtatcgatacacaggcttgttttccaaattcagaattctatacctgactgcatggaaacggggtcacctttcaaaaccatggaataggctacctaacaaaattacccttgggtcgtgagtgccgctataggcagaatcacaaagtggatcttgtgtgctgaatgtaacccccatccccaagataactgtacttacattgggtatgaattggtagttcaagatctcaacccgcccaggtagaggcttgtttatccaggatattcaaccttccgtggactgagccaggtcctacgaaggccacatctgtgaagtacgtggacaagcttcttcccacgtggctgccctaaggctttgtcactgggctgacggaactacgggagagagctttgtggggctagtattagagacaagcaacagggggaccatttcaagcactgacctatctcttcctgctgggtaaagtcttgcttacttaccatgctcttccatgctttgatgtgactctttcttgaggtgttctcacctaccttcttcctctaggtggggtgatttcttttctaagggctgtgtagggttttttaggtggtagtccagactggtcaaagtatgtgtggcaggtcaacgggaaagggagtcctgggaaacccacgttgtcaataatgccattgtctcgtgttttgtacctgaaataaaagccatattttagcactttgtcaaatgaaaaaatcctgtaatgtgtgggctcctgtggcctggggtcagaaatgcataaataaaaccattatgtactaaacccaaaaaaaaaaaaaaaaa

SEQ ID NO: 75 - DNA, 1838 bp, Mus musculus
gcgacccagatgcggccacggaatgcccagctttccggagattgtttgagaaacggccgtgcggcgcccgggcgtcccgcagaccccgcaggagacatatgaaaacccactgatgagctaaccaaggatacattccagcaactcctgctgaaatcgttctccaagactctcagcaagaccatagccaggagttcacatctcgggtcttttgcacagcctgttcctttttcctaactcttggcaagtatgaggtaaaggcctcctgaagcagctgtgcagcagaactctctatcaacttctggtaggccgctgagtgctgcaggggccacgggaacggagcacagccttttgttttagactcaagaaacccaaggatggggaggatcaggtgaaaaccctggtttcaaatcacattggcaacagttgatgtccacaggatccatgcctctagtagttccacgtgtttatattctacaggaaaatagatcaagtgaaggaaccacttagaaattacagacagcatctgaggagatatgactggcaaagaagagaatatgcagagtgcaaacagagtgctgaggataagtcagttggatgcacttgaactgaataaggccctggagcagcttgtgtggtcccagtttactcagtgctttcatggatttaagccaggactgttagctcgctttgagccagaagtgaaagcatttctgtggcttttcctatggaggttcaccatctactccaaaaatgccactgtggggcagtcagttttaaatattcagtacaaaaatgattcttctctcaacctgatataccagccaccgagtaaaactcagaaactgtggtatgctgtgtgcaccattgggggaaagtggttagaagaacgatgttatgatttgtttcgaaaccgtcatttagcgtcttttgggaaagccaaacagttcatgaattttctggttggacttttaaaattaggtgagttgataaacttcttgattttcctacaaaagggaaagtttgcaactttgacagaacgcctccttggcattcattccgtattttgcaagccccagaacatgcgcgaagttggctttgagtacatgaatagggaacttctctggcatggctttgctgagtttctgatttttctcttaccacttatcaatatccagaagttgaaagccaaattgtcttcctggtgtatccctcttactggtgctgctggtcatgacagtacactaggcagcagtggaaaagagtgtgctctgtgtggagagtggcccacaatgcctcacactattggatgtgaacatgtattttgttactactgtgttaagagtagcttcctatttgacatatactttacgtgcccgaagtgtggcacagaagtgcacagtgtgcagcccttgaaatcaggaattgaaatgtcagaagtaaatgctctttagaaaccaagttgtttcctctgagaaaagtgtattgtatccagttccttggaattagtcatcctcagtgtcatctgtaggtggcttttaacaggagtgtgctgtacagccactctcttcctttacaagcacaactcagttctaatcactggaaaccaaatgatactagaaaatcttataaatgttcatgtaatttttttagatcatctaatataatttttaatgtcaagaatactggaaattttttgtcagatgaatactaagaatgactaagaattcttcttcatagaaaaaggtcagactctaaaaataaaaaattttgagggtcaaaaaaaaaaaaaaaaaaaaaaaaaaaaaaaaaaaaaaaaaaaaaaaaaaaaaaaaaaaaaa

SEQ ID NO: 76 - DNA, 2641 bp, Mus musculus
atggctgcgcccgcgcgagagccggctctccgctgctgcatcagactggcgcgagtcttcttgctgctggtgttggcgtgcgaggtggcgggaagcgatgaggccgaggccagggaaggtgcggcgtcccttgcgggctcgtgcggctgcggaacgccccagagggccggggcccatggcagctcggcggcggcgcagcgctactcccgggaggcgaacgccccgggcctgacctcaggcccgcgaccgctcgcgctcaccaagatggtccccattcctgctggagtattcacaatgggcactgatgatcctcagatcaggcaggatggagaagcccctgccaggagagtcactgttgatggcttttacatggacgcctatgaagtcagcaatgcggattttgagaagtttgtgaactcgactggctatttgacagaggctgagaagtttggagactctttcgtctttgaaggcatgttgagcgagcaagtgaaaacgcatatccaccaggcagttgcagctgctccatggtggttgcctgtcaagggagctaattggagacacccagagggtccggactccagtattctgcacaggtcaaatcatccggttctccatgtttcctggaacgatgctgttgcctactgcacatgggcgggcaagaggttgcctactgaggcagagtgggaatacagctgtagaggaggcctgcagaacaggcttttcccctggggcaacaaactgcagcccaaaggacagcattatgccaacatctggcagggcaagtttcctgtgagcaacactggcgaggatggcttccaaggaactgcccccgttgatgcctttcctcccaatggctatggcttatacaacatagtggggaatgtgtgggagtggacctcagactggtggactgttcaccattctgttgaggaaacgttcaacccaaagggtcccacttctgggaaagaccgagtgaagaagggtggatcctacatgtgccataagtcctattgctataggtaccgctgtgcagctcgaagccagaacacaccagatagctctgcatccaacctgggattccgatgtgcagccgaccacctgcccaccgcagactgacagccaagaggagcttttccagattcaagaaggcgtttcttactcgcagctggcctcccctggaaatctgaactgatctcatgtaaagtattcccatctacggaggattccatgtccacccagtggccaaaggaactgtctcgcgtgaccaaatggctggcgagtgtcagcacgtgtgctttattgtgtggtgtatctttggggatcatcgccatgttttactttgaaagccttttgaagaggagagagccgagaaccaggaagtcctggccagactctgccacagggtcagaccctggagtccagcaccttgtctgccttgacctctgtctcctcatgaaatgagggatggtcaacgtgatctttgaggctctctccaactctatttgaactagcagattctattcgaactagcagagtgtattgtgattgcatagtgagaatttatgacagattattttttagctatttttttgccatgtgtgaatcttgagtaatactaatcatataaggcgagagttatcttacatattattttcagaaaagggtggggtttgagtcttttatattcatactgcactttgttctttcaaggaaatcagtgtcttttacattgttgtgacaaatcccattgggacagcgaggggacacttaagtttggagttctgaacacacaggaatgcctgtggagtgactctactgtcctttttcttttgacattaagtgcctttggctcagagggacagtttgaagccttgtttcccctttgcccccaagccttcaaagaatgtgaaatatgtactaattagggaaaccatttaattctaggtctttgggtgttgaggttttgtcagatggtatgaattgtattgtaatgctaaatctggtacctgaaggtctaggcctgtgagtgaattctcacatttacaagattttgttgtgcaaaccttgttccttaatttaaaactattggttaaataaaattggctacagccaattactggagggattagaggtaggtgggttttgagtgtggttgggtatggagagagagaggagagatcaaggagagaagcaggaagaagaggataggaggagctgccatgaagaagatggaccataagcctttgtccagaggaaactcccaagtatctgggaacaccgctgtgaggcaaccaggccagcagttagaaaagtagattaggggctacccccagtaattgtcaaagccaaataaaatatccatagtctgagtctcatttatttgtaagccagttggggataagcttatattggtaccacatgggagaaaaagaaccaggaccttgaatagactccattcagggtgtgtgatatattacaccagagagatacgagaaatctggttgattttgcgatatcagatgctttgaatcatgtactatgtcaaataaactagtacctcccgaaaaaaaaaaaaaaaaaaaaaaaaaaaaaaaaaaaaaaaaaaaaaaaaaaaaaaaaaaaaaaaaaaaaaaaaaaa

SEQ ID NO: 77 - DNA, 1720 bp, Mus musculus
gtctaactaccagagccggtggaaccactacactctgcttcttctgctcttgggtttttaggccatggggcagccatatgcgtggcggctcctgtcgagggtcagctccttcagaagagccagcgttattctgcaacatctgagaatgtccatgcacacagaagctgcagaagtgctgctggagaggagaggctgtggaggcgtcataacgctcaacagacccaagttcctcaacgcactgagtctgaatatgatccggcagatctatccacagctaaagacatgggaacaagaccctgacacattcctgatcatcataaagggagccggaggaaaggccttctgtgctggaggggacatcaaagcactctcagaagctaaaaaagcaagacagaatttaactcaagatttattcagagaagaatacatcttgaacaatgcaattgcatcttgtcagaaaccatatgttgcccttattgatggaatcacaatgggtgggggagttggtctttcagtccatggtcaattccgagtggctacagaaaggtctctctttgctatgccagaaacgggaataggactatttcctgatgtgggtggaggttatttcttgccaagacttcaaggaaaactcggttacttccttgcactgacaggatacagactaaagggaagagatgtgcacagagcgggaattgccacacactttgtagattcggaaaagttgcgtgtgttggaggaggagctgttagccttaaagtcaccttcagctgaggatgttgcaggtgtcttagaaagctatcatgccaagtccaagatggatcaagacaaatctatcatatttgaggaacacatggacaaaataaacagttgtttttcagccaataccgtggaacagataattgaaaacttacggcaagatgggtcaccttttgccatagaacagatgaaggtaattaataaaatgtctccgacatcactaaagatcacactaaggcaactcatggagggctcttcaaagactttgcaagaggtactgatcatggaatatcggataactcaagcatgtatggaagggcatgactttcatgaaggtgttagagctgttctcattgacaaagaccagactccaaaatggaaaccagccaatctaaaagatgttacggatgaagacttgaatagttactttaaatctctgggaagcagtgatttgaaattctaaagtttattttggagcaaaggtcaacacatcatagcacagaggctaggcccattttcatgcagcctacaagctggaaatggttttctcatttttaaatgattgggaaggaaatgaaaagactaatatttcatgatacagtggttgcccaaagtttaagcaccaatgtttgtaacttttcatgatatgacagctgagatccatacaccaatgttttatggaaccttcctgcagcgtagcagagcttctctatggctgcttggagtggccatggcacagactttgacccacagcacctcaagggtctaagtttctactccagtcttcatcagaaatggtttgttggttcctggtttataagaaattctcaagagctccagagaatctcaagtttatttctcattaaaatggtaactttgactttgtttatatactaattaaccaaattatgtacaagttagcaaaaataaagaccctgaaatttgaaaaaaaaaaaaaaaa

SEQ ID NO: 78 - DNA, 1372 bp, Mus musculus
gcaggatggggggaagagaagggaattccaacctgtagaactttgggggtcctatgatcgggttcttccccacgactgtggatggtgaaaggggtggggcctttggcggctccggggtgtactggagttcgctgggtgagggagggggtgtcaagtgtgagagaggtgcaggacttccaaatttagaaccttgaggccctttgggctcgggtccaaggcactccggccaccatgcgcgacaggacccacgagttgaggcagggggataacatctcagacgatgaagatgaggttcgagtcgcgctggtggtgcactcaggtgctgcccggttgggcagcccggacgacgagttcttccagaaggtgcagacaattcggcagactatggccaaactggagagtaaagtccgggagttggagaaacagcaggtcaccatcctggccacgcctcttcccgaggagagcatgaagcagggcctgcagaacctgcgagaggagatcaaacagctggggagagaggtccgggcgcagctaaaagccatagagccccagaaggaggaagctgatgagaattacaactcagtcaacacaaggatgaagaaaacccagcatggagtcctgtcccagcaatttgtcgagctcatcaacaagtgcaactcaatgcagtccgaataccgagagaagaatgtggagcggatccggaggcagctgaagatcaccaatgctggaatggtgtctgacgaggagctggaacagatgctggacagtgggcagagtgaggtgtttgtgtctaatatcctgaaggacacgcaggtgactcggcaggccctgaatgagatctctgcgcggcacagtgagatccagcagttggagcgcagtatccgagagctccatgagatctttacgttcctagctacggaggtggagatgcagggggagatgatcaaccgcatcgagaagaacatcctgagctcggccgactacgtggaacgtgggcaagagcacgtcaagatagccctagagaatcagaagaaggcgaggaagaaaaaagtcatgattgccatctgtgtctctgtcactgttctcatcttggctgtcatcattggcatcaccataaccgttggataatgtcacatgttcttggcattgggagagacagagacccagcttttgtggaggtggggcaggcctccaactgaacccgtccgcacactggaccttgtgcagagggcctgcggctcgtcctgggttggcagctgctcattcatggagtcctcccctggagtcctccacaatgcctgcgagacagttttcaatgtcctgtttgtctgggatacatggttttgtaaaaaatttaaaaaaaaaaaaaaaa

SEQ ID NO: 79 - DNA, 3391 bp, Mus musculus
ctggaggactccctacattcttcctccattacctcactgcctccggtgcctgctgggatagaggaggactcgggtcccgactcgactcggtcctccgcccgccccgggaatacctctagctctccccggccgccaccgccccgccgcttcctcctgtgccctcccgccggcctccttcgggcgtcctcacccgtcttgggactctgctttttcgggagcccccacctaggcgcatggctccatgaagcaagaggaagagaaggcagagcgcgagaggtcccgtccgccccggctgtgtctgggtcaggagagaaggcattggaagaaggaatggaattggaagaaagaagattcattccagagacaaaatagcttccctttcctattgtagctgtttcctctgggactataacctttctgctttcaggttctgcagcattccagatcaagaacaccaaatcaggatgggaaaaagacgttgtgttcctccccttgagcccaagttggcagcaggctgttgtggggtcaagaagcccaaactatctggaagtggaacgcacagtcacgggaaccagtctacaactgttcctggctcaagttcaggacctcttcaaaaccaccagcatgtggacaacagcagtggtcgggaaaatgtatcggacttaactctgggacctggaaactctcctattacacgaatgaatactgcatctggagccctgagccctctcccccggcccaatggaactgccaatagcactaagaacctggtggtgactgcagagatgtgctgctactgctttgatgtgctctactgtcacctctatggcttcccacagccacggcttcctagattcaccaatgacccctatcctctctttgtgacctggaagacagggcgagacaagcggcttcgtggctgcattgggaccttctcagccatgaatcttcattcaggactcagggaatacacattaaccagtgcacttaaggacagccgattccctcccctgacccgagaggagctgcccaaacttttctgttctgtctccctccttactaactttgaagatgccagtgactacctggactgggaggtaggggtccatggaattcggattgaattcatcaatgaaaaaggcatcaaacgcacagccacatatttacctgaggttgctaaggaacaagactgggatcagatccagacaatagattccttgctcaggaaaggtggttttaaggctccaattaccagtgaattcagaaaatcaatcaaactcacaaggtatcgaagtgagaaggtgacaatcagttatgcagagtatattgcttctcgacagcactgtttccagaatggcactcttcatgccccgcccctctacaatcattactcctgacacacggctacatgaccagtcccacccccctgtggccaccaatggctatgacatcattggagcagatgcctcctcttcctggtccagttacttctattactgcaccattttatgatgctagcttccgttgccaagtctgcctcctgctgactggagggtgtggggatacattgaatgcaacagaacatgaggggcccaagccttatatcagcctttcctcaatctggggttctgttggatcagggctccccaataaccagtgagaatggctgtgtgggttcagaagaccgttgtctggtgatttcccacaagtattggccacacactgaaaactggaattgactgtgacccatggaggcttcttccccaatcccccacagcccgccacatcaattagctgtactccctggcagtctgggcaacggagaccaacaggaaccacttttaggttgttttaaattcctttttttaaacttccagtttattgtgtaccaagagttgatccacaacctccatgcttcagaagtgaacaccatgttagggttgaacatgggcaccatgagcccctgtgagtcctggataagattctcaaaccaagatcagaaatcctgtgatgacatttcatcgtacagtaagctgtgaaggttttcatgcttacccgactctcagtggacattctggtactcttcctgcattgagtctcctgctgtgagctctgtggcatagcctgctgaggaatggaatggagatgcctatagaggtcccaatgtcatcgtcgtaagcaggtgtgaaaggagagatctcttcctcaccacccggctacctcaactcttttctggtagcattgcctatgtagctgcatctaggttctcagaagcacagacatgtaaacaggtggttgggttgggctttaggacatactgtcacaggagagcttccagggtctctgagctggttttcttcacaggcaaacatcctgagggacctttaagtaggggagttctttattctgatttgcctgcagaagtaggaagacttgctatatcagtcctcagtaggactagaacaatgctgtgtaataaaacaaggtgaacctttaacttgcctaccatactgggactcctcacttcaccagtgcaaatgtccaaactgttcgtgttgctcatttaaactcttgacattcccgctcccatctttactcattccaaaatagctgatagcaaattcttttcattcatttggtggcaaaacgtgtagtactaggaaactagggaggtgctttgacagctctgtctcaaaggcactgactgctcaggcaactcaaaggaaacggccggctggaagaaaggctcctgaggatggcgcactggttttcagcaacattcatagagactcgggaggcagatgtggcctcaacctggtgaacatatgttttgatttctttttttaggattgatgtggtgatggtgtggctttccaaaatgggcaaatattcaagtcctagctcatcagtttcttgtgccaggaatggaggaagggaagtagatctacttccatatgtgctattctaggcatcacttcaaagttcttgcggttttcatttgttttgttttgttttaaaactgggcagagaggttgtaccaggagtgatgacagacctggaatggatgagggaagtgctgatgacattggaatgcccaggatgcatggcccttactgccagggtgggttccttcacatacctaggatgaaggggtctcatgctgcctgccgaggggaatgaaggctatgttattgacatgtgacagcaggtgctctcaggtgccatggattgatgcagggtgctcagctctggactgaggtacccacttccaatttgtaaaacagtattgatacatagggctacactcattactgttcaagcgttctatgttaagagttgtttaatttctaaagatttaaagcaaaatgcaaaaaaaaaaaaaaaaaaaaaa

SEQ ID NO: 80 - DNA, 4344 bp, Mus musculus
gacagtcggggcggcatggccgaggctggcggggccgggtccccagcactgcctcccgcgcccccgcacggttccccccggaccctggccaccgctgccgggagctctgcttcctgcgggccagcgaccgcggtggccgcggcgggcacggccgagggaccgggaggaggcggctcggcccggatcgccgtgaagaaggcgcagttgcgctctgctccgcgggcgaagaagctggagaaactcggcgtgtactccgcctgcaaggcagaggagtcctgtaaatgcaatggctggaagaaccctaacccctctcctactccaccaagaggagacctccagcagataattgtcagtttgacagaatcctgtcgaagctgtagccatgcccttgctgctcacgtttctcacttggagaatgtgtcagaggaagagatggacagactcctgggaattgtgttggatgtggagtacctcttcacctgcgtccacaaagaagaagatgcagataccaaacaagtgtacttctacctattcaagctcttgagaaagtcaattttacaaagaggaaaacctgtggttgaaggctccttggagaagaagccgccatttgagaagcccagtattgaacagggtgtgaacaacttcgtgcagtacaagtttagtcacttgccatcgaaagagaggcagacaacgatcgagctggccaagatgtttctgaaccgcatcaactactggcatctggaggctccatctcagcggagactacggtctcccaatgatgacatctctggatacaaggaaaactacacaaggtggttgtgctactgcaatgtaccgcagttctgtgacagcttacctcggtacgaaaccacaaaggtgtttgggagaacattgcttcgctcggtcttcaccatcatgagacgacagctcttggaacaagccagacaggaaaaagacaaactgcctcttgagaaacgcacgcttatcctcacacatttcccaaagtttctgtccatgttggaagaagaagtgtatagtcaaaattctcctatctgggatcaggattttctctcagcctcttccagaaccagcccgctaggaatccaaacagtaatcagtcctcctgttactgggacagcattgttcagttcaaattccacttcccatgagcagatcaatggagggagaacaagtcctggatgcagaggctcttctgggcttgaagcaaacccgggagaaaagaggaaaatgaacaactctcatgctcccgaggaggccaagagatctcgagtgatgggggatattcccgtggaattgatcaatgaggtcatgtctaccatcacagaccctgcagggatgcttggaccagagaccaattttctgtcagcccattcggccagagatgaggcggcacggctggaagaacgcaggggtgtcattgaattccacgtggtgggcaactccctgaaccagaaaccaaacaagaagatcctgatgtggctcgtgggcctccagaatgtgttttcccaccagctgcccagaatgcccaaagagtacatcacacggctcgtctttgacccgaaacacaaaacccttgctttaattaaagatggccgtgtcattggtggtatctgtttccggatgtttccatcccagggattcacagagattgttttctgtgcagtaacctcaaatgaacaagtcaagggctatggaacccacctgatgaaccatctcaaagaataccacataaagcacgagatcctcaacttcctcacatatgcagatgagtatgccatcggctatttcaagaagcagggtttctccaaagaaatcaaaatacctaaaaccaaatatgttggctacatcaaggattatgaaggggccactttgatgggatgtgagctgaaccctcagatcccatacacagagttctctgtcatcattaaaaagcagaaggagatcattaaaaagctgatagaaagaaaacaagcccagattcgaaaagtctaccctggactttcgtgtttcaaagatggagttcggcagattcctatagaaagcattcctggaatcagagagacaggctggaaaccaagtggaaaagagaaaagtaaagagcccaaagaccctgagcagctttacagcaccctcaagaacatcctgcagcaggtgaagaaccatccaaatgcttggcctttcatggaaccagtgaagagaacagaagctccgggatattatgaagttataaggttccccatggatctgaaaaccatgagtgaacgcctcaggaacaggtactatgtgtctaagaagttattcatggcggacttgcaacgagtgttcaccaactgcaaggagtacaaccctcccgagagcgagtactacaaatgcgccagcatcctggagaagttcttcttcagtaaaattaaggaagcagggttgattgacaagtgatttctttcccttagacacacatcagcagtgtgcctaaaacaggtcatttaggtttttggttgcttttgtttttttgtttttgtttttaaattgtacatcatgtgttgaagagacttgtaataattagcacttttgaaaaacaaacaaaacctccttttagcttttcagagacgtatttaaatggaaatcatagatttttttttttattttgagcaatagattttaatctatttactactatcatgtaatttttctctggcatgtccagtagctgactattgcatggtagatgatcaggggcttcctcaaaacctgtatgtgaggaaattgcacacagtaccaagatttggggtaatctagagaaaagtttgaccatgaatgtctccattttttttctaatggaacatgagagtttattttattctgaaggactttaaagggtccgtgacacacctgtgctgtgaatgaactgtgtgatgtttgaagtctccttgtagactttttataagtatatatttttaaaacactcatctagatgaggtgctttgagcagttctgaaaaaaaaaaaatgcagcttccacaatagcggctgctatgactcctaaggaagggactttttataagctcctggggctttgatcattctgtctacctattacagacttgagagtgcacaaccactatttaataatatcttggcagatatgtgtccatctcatatttgactttgcttgtgcagggcccaacttctaaaagatccgttcccaggccacaaaggtgttagcttgaaaatatttgaggttgagttaatgttaagacatgtggcctaaacatgaacccaggggagccttgcttcactatgtaaggattctttgtattttctggtacatttaaccccatcaccagtgtctatgtgaacatttcccatttgcacttccagagttttgtttgtctgaggtgaactgaattctcaccaaagtttaggccagtattttaacacctccattgttttattggtccagggttatatcccactaacattcgctgtacaatcttattaaccatttttgtcttgggactccagcttagtgcttggatttatttcctaattacactacatagaaaagtgggacacctgccagcccaactctgggaaaaaccaactaatatacaaccatattaaatgaaggccaccttaatggtctcgacactaatttttatgatgcaaatttataaactgatttttttgtaaaggctgaggttttaaaaatgtatttaatgtatgttttctatccgcataaattatattgggtcactaatagtcattaaaaatagcttgcagaggtagtgtgcttgaaggaaaatatcctggcattgctcccgagtgctgcttctgacatggaaggcatgctgtatgttcatagtgttcactgaagatcacactgaagatgcctcaacattgggaaatgtaaggaacactttgtgtggtatctagactattaatgaagagtgataatagaggctgcattaagtgtctcagactggttttaaaacagctttgtaccgatttcgctgaagcgtctgtccagtttggtatcctgtgaaagtttgttatttcctgggtagacatccttaaagagtattgtctttaaaatcagatggtctcttctatattgaaagcatttttatgttttctaatttaaaattaatattttcttatagatattgtgcaataaagcagaagtagaatgtggtttttgcaaatgctttaacggccgacaaaaactttacatttgtaaaattaatatattgtactggtacaaaatagttttaaattatattttgaaaagctcaaaaaaaaaaaaaaaaaaaaaaaaaaaaaaaaa

SEQ ID NO: 81 - DNA, 2252 bp, Mus musculus
  modified_base (939)..(939): a, c, g, t, unknown, or other
tcccggagccggtgagaggtccctgctgctcccttacggcgctttctaggcctttaccccaacgagtgggccatagagacgcgggcccagagagaccgtaaagttgctgatcaaaggctagagcggtgtcgggggtggggggctgcatccaggaagggtgttggggatgaggtggaccggccttggggacaatgtaagagcggagcaagtagtatagaggaagggcttcaagggacgcggatcccgaataggtagattgagagtcaagtcgagtcgtctcttgttcctccggtcagcgtgatgaccatgggcctgcgggccccccactgggtggctgtgggactgctgacctgggcggctttggggctgctggtggccggacacgagggtcatggtgacctgcacaaagatgtggaagaggacttccatggccacagtcacgggcactcacatgaagatttccaccatggccacagccacgggcactcgcatgaagatttccaccatggccacggccacactcatgaaagcatctggcatgggcatgcccacagccacgaccatggacactcacgtgaggaattacaccatggccatagccatggccactcccacgatagcctccaccacggaggacatggacatgcccatcgtgaacatagccatgggacttctagggaggctggggctccaggcatcaaacaccacctggacactgtcaccctctgggcctacgcactgggggccacagtgctgatctccgcagctccgttcttcgtgctgttcctcatcccagtagaatctaactctcccaggcaccgctctctgctccagatcctgctcagttttgcttccggggggctcctgggtgatgcgttcctccacctcatcccgcatgccttggaacctcattctcaccacgctccagagcagcctgancatggacactcccacagtggccagggccccattctctctgtggggctgtgggttctcagtgggattgtcgccttcctcgtggtggagaaatttgtgagacacgtgaaaggaggacatggacacagtcacggacacggagacaggcatgcgcatggagacagtcacacccatggagatagacatgagtgttcttcaaaggaaaagcccagcacagaggaagagaaggaagtgggcgggttgcggaaaaggagaggaggaaacactgggcccagagatggcccggtgaaacctcagagccctgaagaagaaaaagcaggctcagacctgcgtgtgtctgggtacctgaatctggctgctgacttggcacacaacttcacagacggtctggccattggtgcttcctttcgtgggggccgagggctagggatcctgaccacaatgacagtcctgctgcacgaactgcctcatgaggttggggattttgccatcctggtccagtctggctgcagcaagaagcaggcgatgcgtctgcaactcgtgactgcaattggagcattggcaggcactcgtgtgcccttctcaccgagggaggggcagtggacagtgacgtggcaggtggtgcaggtcctggctgggtcctgccattcactgcaggcggatttatctacgtagcaacagtgtctgtgctgcctgagctattgagagaccgatctccactgcagtcactgttggaggtgctggggctgctggggggtgttgccatgatggtactgattgcccatcttgagtgaggggtgaggtgacctgtccttcccctaactcctaataaaggcagttggtagtcctggccagtgctaatgccagaaggagtgtcagccttggagattagcagagcctctgtttgaggccttagaggtatgaggatcatacggagcatgagaggccagaaggaccacggagtgggagactgcccagcagcgttgttgcttttggaaaaatcaatgggaccatgaagaagactgggaagacggtagcctacccgatggtccctaatctacgatttctcagcgccacgtgccgcaggggtccctccaaggcccatctccctctgaactagttagtgatggcttcagggaagacctggcagaaggactggggtagacatcaatcgtgtgtcctgatttgaagggggaggggggctccttgggaagatgtctcagcctgattttttgtctctactcattttataccactgtttgaatgggtgcggaggaacggtgaccaggaataaaagaccttggatcttcggcccc

SEQ ID NO: 82 - DNA, 2035 bp, Mus musculus
cacgagcacagaggctggcagctggctggtttcagctctgcagactgcagaacacagaagatggctttcattgcagctctggggctcttgatggctgggatctgccctgctgtcctctgcttcccagatggcacgttgggaatggatgctgcagtccaagaagaccatgacaatgggacacaactggacagtctcacattggcctccatcaacactgactttgccttcagcctctacaaggagctggttttgaagaatccagataaaaatattgtcttctccccacttagcatctcagcggccttggctgtcatgtccctgggagcaaagggcaacaccctggaagagattctagaaggtctcaagttcaatcttacagagacctctgaggcagacatccaccagggctttgggcacctcctacagaggctcaaccagccaaaggaccaggtacagatcagcacgggtagtgccctgtttattgaaaagcgccagcagatcctgacagaattccaggagaaggcaaagactctgtaccaggctgaggccttcacagcagacttccagcagcctcgacaggccaaaaagctcatcaatgactatgtgaggaaacagacccaggggatgatcaaggaactggtctcagacctggataaaaggacattgatggtgctggtgaattatatctactttaaagccaaatggaaggtgccctttgaccctcttgacacgttcaagtctgagttctactgcggcaagaggaggcccgtgatagtgcccatgatgagcatggaggacctgaccacaccctacttccgagatgaggagctgtcctgcactgtggtggagctgaagtacacaggaaatgccagcgccctgttcatcctccctgaccagggcaggatgcagcaggtggaagccagcttacaaccagagaccctgaggaagtggaagaattctctgaaacccaggatgatagatgagctccacctgcccaagttctccatctccaccgactacagcctggaggatgtcctttcaaagctgggcatcagggaagtcttctccacacaggctgacctgtctgcaatcacaggaaccaaggatctgagagtgtctcaggtggtccacaaggctgtgctggatgtggctgagacaggcacagaagcagctgctgccactggagtcaaatttgtcccaatgtctgcgaaactgtaccctctgactgtatatttcaatcggcctttcctgataatgatctttgacacagaaactgaaattgccccctttatagccaagatagccaaccccaaatgagactagaactccccaagtgttgacgcttcttcccgggagccaggcattgagcctgtctgtgggtctccatgtgcattttggcttccatgctctgcttggccttggcatgcctggattagatagtgactaactgtgttataacctcatgtacagacatccctgtgggaagtcagtgccgtgctcccagacttcttggtagcactagcccatgttcctgagcctgaaatttgtcttgtcccctacccctgctctctccctgtatctgcctccacccaaaagcctgggccccatcaagtaagctcagtcccagtttagactctggttatgtctcccttcagccttgctgtcttgatgggactgtgcaaccttacaggccaacccatatggaccaagaggaaagcttggctggcccgtgtctatccgcagcatctaggactacttggtgcccagtctgcctcactctttcatttctccaggctttgcctccaggcactgcccccctgcaggatctcctcactttgtccacatctggcacagagttagagccctcacttctgcagctgcatggggtctgtgggtcagagcagatcctttcccctggcactcctacttagaacaaagtagcctttcttttagttcccagctgaccaacctcacacaaaagaggaacaccaaccagaataaagaggtaggagcaaaggatcaataaacatgtaac

SEQ ID NO: 83 - DNA, 3450 bp, Mus musculus
cgtcttaggaggctggagattctgggtggagccctagccctgccttttcttagctggctgacaccttcccttgtagactcttcttggaatgagaagtaccgattctgctgaagacctcgcgctctcaggctctgggagttggaaccctgtaccttcctttcctctgctgagccctgcctccttcggcaggccagagctcgacagaagctcggttgctttgctgtttgctttggagggaacacagctgacgatgaggctgactttgaactcaagagatctgcttaccccagtctcctggaattaaaggcctgtactaccttgcctggacctaagattttcatgatcactatgcttcaagatctccatgtcaacaagatctccatgtcaagatccaagtcagaaacaagtcttccatcctcaagatctggatcacaggagaaaataatgaatgtcaagggaaaagtaatcctgttgatgctgattgtctcaaccgtggttgtcgtgttttgggaatatgtcaacagcccagacggctctttcttgtggatatatcacacaaaaattccagaggttggtgagaacagatggcagaaggactggtggttcccaagctggtttaaaaatgggacccacagttatcaagaagacaacgtagaaggacggagagaaaagggtagaaatggagatcgcattgaagagcctcagctatgggactggttcaatccaaagaaccgcccggatgttttgacagtgaccccgtggaaggcgccgattgtgtgggaaggcacttatgacacagctctgctggaaaagtactacgccacacagaaactcactgtggggctgacagtgtttgctgtgggaaagtacattgagcattacttagaagactttctggagtctgctgacatgtacttcatggttggccatcgggtcatattttacgtcatgatagatgacacctcccggatgcctgtcgtgcacctgaaccctctacattccttacaagtctttgagatcaggtctgagaagaggtggcaggatatcagcatgatgcgcatgaagaccattggggagcacatcctggcccacatccagcacgaggtcgacttcctcttctgcatggacgtggatcaagtctttcaagacaacttcggggtggaaactctgggccagctggtagcacagctccaggcctggtggtacaaggccagtcccgagaagttcacctatgagaggcgggaactgtcggccgcgtacattccattcggagagggggatttttactaccacgcggccatttttggaggaacgcctactcacattctcaacctcaccagggagtgctttaaggggatcctccaggacaagaaacatgacatagaagcccagtggcatgatgagagccacctcaacaaatacttccttttcaacaaacccactaaaatcctatctccagagtattgctgggactatcagataggcctgccttcagatattaaaagtgtcaaggtagcttggcagacaaaagagtataatttggttagaaataatgtctgacttcaaattgtgatggaaacttgacactattactctggctaattcctcaaacaagtagcaacacttgatttcaacttttaaaagaaacaatcaaaaccaaaacccactaccatggcaaacagatgatttctcctgacaccttgagcctgtaatatgtgagaaagagtctatggcaagtaatcaggtataaattctcaatgatttcttatatattctgggtcttgggaaaacttgattctagaaatcaaaattaatttgacaaaggaaaagcagatgccggaaacttcttcccagtctgtcatacaattcaccactggccaggtgctgagagaagcattagggaacagtgtgggttgtgtcagagttggacggctccatccctttggcttcattatcttcctcctcatggagattctaaagcaacccagagaggctttgcagccagagacctttaataaggatgccaatgtgaccatcagtctgtaaaagctgatggctccaggagcgctggcagtccaggccccactaggctattgtttctgtcctgggcataaaggaggcagagagtgccaataggtactttggtggcacatgttcagagtccaggaaaaatcaagggtgaccacttagagggacataggacttggggttggtgattgaactgagttacaaacacagacagctttcttcaggatgactaacagcaggaattgaatggaaagtgtgttcattttgttttgcccaaattgtattcatgctgttagctttgtgtgttgagccctgtggagagggtgtgactgtatcagggaaggagagtacctcagcggactgaggaccagcaccctattatatcagaagacaatctctcatcatcaggtcctacctacaacctgctctgaacctccgagttcctcagcccatcgtgttccagtgtgggggcctgtatggagcaggtgactgaagacaaagccccctgtcacatgacctcatttcccctgctctagtactatgcaagtgtgacagccagccagccagatgtactggacaacataggaaccgactttatggcaatgggagccgcagtcactacaacggagctgctgaaggttctgttccccgctctgagagcctgcaggagcccctgtataggtggttctcaacctatgggtcgcgacccctttgggaagtgttaaatgaccctttcacaggtgtcccctaagacggttaaaaaacatagatatttccactctgactggtaacagtagcagaattacagttatgaaatagcaagggaaataattctggggttcgtgtcatccataccatgaggagctacattaggtcacatcattagggaagttgagaagcatagctctacttgggtatttaagcaaattatgcaaagggggttgtcgctctgtgttctgtgtatgcatatatttatattttgcttgtcttccagtttaggtcaatctgtttcttcctttaagcagtttatttaaaaggccattgcaccatcttggtgaacagcatgaggggtttcaataaaaaataggatcttacctttgtccacagggctctacctcttacttttcaattgtgaacaaaaaaggtcgcacacccagaggcaacaaaacccacagaattcctgaaccaatgggagatgccaatggaagcagagcttgcacatctgctaaaaattctgcctctctgtcactgtgctggatccgtctaaagtgggacagttcaatggtctgaaagtttcaaaaaggctggggaatttgaggggatttttttttaaaataaaattgatccaagtttaaatctctaatgagtaagcttaggattttattaaaggtaatttttagacattcttcaaaataagaattc

SEQ ID NO: 84 - DNA, 2937 bp, Mus musculus
gagcgaggcagccgccgccatgggctctctcttccgcagcgagagcatgtgcctggcgcagctcttcctgcagtcgggcacggcctacgagtgtctgagcgcgctgggcgagaagggcctggtgcagttccgagacctcaatcaaaatgtaagttcttttcaaagaaaattcgtcggtgaggtaaagaggtgtgaagagctcgaacgaatactggtgtacctggtgcaggaaatcaccagagctgatattcccctgcctgaaggagaggccagtcctcccgcaccacctcttaaacatgtcctagaaatgcaggaacagctgcagaagctggaggtggagctcagagaagtcaccaagaacaaggagaagctgaggaagaacctgttggagctggtggagtacacccacatgctgagggtcacgaagaccttcctcaagcggaatgtggagtttgagcccacgtatgaagagtttcccgccttagagaacgactctctgttggactacagctgcatgcagcggctgggcgccaagctgggattcgtttctggcctgattcagcaaggcagagttgaagcatttgaaaggatgctgtggcgggcctgcaaagggtacaccattgtgacctatgcagagctggacgagtgcctggaggaccctgaaacgggtgaagtcataaagtggtacgtgttcctgatttccttttggggagagcagattggccacaaggttaagaagatatgtgactgttaccactgccacatctacccgtatccaaacacggctgaggagcgcagggagattcaggaggggctcaatactcggatccaagacctttacacggtgctgcacaaaacggaggactatctgcggcaagtgctctgcaaagctgccgagtccgtgtgcagccgtgtggtccaggtgaggaagatgaaggccatctaccacatgctcaacatgtgcagctttgacgtcaccaacaagtgcctcatagctgaggtctggtgccccgaggtggacctgccaggcttgcgcagagcactggaggaaggctcgagagagagcggagctacaatcccctcgttcatgaacacaatccctacgaaagaaacaccccccactctgatccgcaccaacaaattcactgaaggtttccagaacatcgtggatgcctatggagtcgggagctacagagaagtgaacccagctctctttaccatcatcaccttcccgttcctgtttgctgtgatgtttggcgactttgggcacggctttgtcatgttcctgtttgccctcttactggtgttaaatgagaatcaccccagactaagccagtcacaggagatccttaggatgttctttgacggccggtatatcctgctgctgatggggctgttctctgtgtacaccggcctcatctacaacgactgcttctccaagtctgtgaacctctttggttctgggtggaacgtatgtgccatgtacagctccagccactctccagaggagcagaggaagatggtactttggaatgacagcaccatcaggcacagcagaactttgcagctggacccgaatatccctggagttttccgaggcccctacccttttggcattgatcctatttggaacctggccacaaaccgcctcacgttcctcaactccttcaagatgaaaatgtctgtgattttaggaatttttcacatgacttttggtgttgttctgggaatatttaaccacttgcactttaggaagaagttcaacgtctacctggtctcggtgcctgagatcctgttcatgctctgcatctttgggtacctgattttcatgatcatttacaagtggctggcatactcggcagagacctcgagagaggccccgagcatcctgatcgagttcattaacatgttcctgttcccaaccagcaagacacacgggctctacccagggcaggcacacgtccagagagtgttggtggctctcacggtgctggctgtccccgtgctcttcttaggaaagccgctttttctgctgtggctgcacaacgggcgcaattgctttggcatgagccggagcggttacacactcgtgaggaaggacagcgaggaagaggtgtctcttctgggcaaccaggacatagaagagggcaacagccgcatggaagaaggctgccgagaagtgacgtgtgaggagtttaacttcggggagatcctgatgacgcaggccatccactccattgagtactgcctcggctgcatctccaacaccgcctcctacctgaggctctgggcactcagcctggcccatgcacagctctctgatgtgctgtgggccatgctgatgcgcgtggggctgcgtgtggacaccacctatggggtcttgctgctgcctgtcatggctttctttgcagttttgaccatttttatccttctggtcatggagggtctttctgcattcctccacgccataaggcttcactgggtagaatttcagaacaaattctacgttggtgcaggcaccaagtttgttcccttctccttcagtctgctctcctccaagttcagtaatgatgacagcatagcatgattgcacgctgcagcaagcccgctctgatcaacggaggactatcatgttacagaattcactcactcactccggtcagaacttaccaggggaaagttccaccctcgttgattgccttacgattcagccaaatggttctgtaagatacacctcttcctcatggtgaagattttgtaaaactcaccactccggacacagaaatttcgttggtttttattatgagcaaatataagttaatgccaacgctactttaaagttattttttaaagtgtaagattggaggagagaagccagctgaacagcctagctaaaaatggtcttagatacttgattccttttcaacttaaaaaaaa

SEQ ID NO: 85 - DNA, 1801 bp, Mus musculus
gcaagatggcgggcggagaagccggtgtcactctcgggcagccgcatctttctcgtcaggatcttgccactttggatgttaccaagttgactccgctttcacgtgaaattatcagcagacaagccacaattaatataggcacaattggtcatgttgctcatggaaaatctacagttgtaaaagccatttctggtgttcacactgtccgattcaaaaatgaactagaaaggaatattaccataaaacttggatatgctaatgccaaaatttataagcttgatgactcaagttgtcctcgaccagaatgttacagatcttgtggaagtagtacacctgatgagtttccttcagatattccagggaccaaaggaaacttcagactagtcagacatgtttcctttgttgattgtcctggtcatgatattttgatggcaactatgctgaatggggcagcagtgatggatgcagctcttctgttgatagctggtaatgaatcttgtcctcaacctcagacttctgaacacctggctgccattgaaattatgaagctaaaacatattttgattctgcaaaataaaattgatttggtgaaagaaagccaggctaaagaacagtatgaacagatacttgcatttgtacagggtacagtagccgaaggagctcctattattccaatttctgctcagttaaaatacaatattgaagttgtatgtgagtatatagtaaagaaaattccagtacctctaagagactttacttcagaaccccgacttattgttattcggtcttttgatgttaacaaacctggctgtgaagttgatgaccttaaagggggtgtagctggtggtagtattttaaaaggcgtattaaaggtgggacaagagatagaagtgagacctggtattgtttctaaagacggagaagggaagcttatgtgtaaaccaatcttttccaagattgtatccctttttgcagaacacaatgatcttcagtatgctgctccaggtggtcttattggagttggaacaaaaattgacccaacgttatgccgagcagatagaatggttgggcaggtccttggtgctgttggagcattacctgagatattcacagagttagaaatttcctacttcctactgagacggctcctaggtgtacgtacagaaggagacaagaaagcagcaaaagttcaaaagctatccaagaatgaagtactcatggtgaacatagggtccttgtctacaggaggcagagttagtgcagtcaaggcagatttgggtaaaattgttctaaccaatccagtatgcacagaagtaggagaaaaaattgctctaagccgacgagttgagaaacactggcgtttaattggttggggccagataagaagaggcgtgactatcaagccaacaatagatgatgaatgagatgatacatttggatgaaaccaggaattttttcataacagtcttagagatattttcaaatctaaaaagtaggacatctaaagaaggaaataaatttcacagcttattattatattagtaaaaattgccaggttattttcattttcagtagaaaaaaattgatgtctgtaaaaaaaaatgacaaacttcttgatacatttaatctgcaattcaacaaatagtattattgttgtagcttgatagttaacaactgttgctgtgcaccactgaacttacagtaaagaaagtttttcttatgtttgaaggattgttactctaataaaaacttgaaggctggattcaaaaaaaaaaaaaaaaaaaaaaaaaaaaaaaaaaaa

SEQ ID NO: 86 - DNA, 3680 bp, Mus musculus
gccccccgcgccgcccaggccgtgaccgggcggggggcggctgcgctagcgcccgcagcccaggggctcgcggagccgggagcgataaccatggactgcagtctattgaggacgctcgtgcgcagatactgtgcaggggaagagaactgggtggacagtcggaccatctacgtgggacacaaggagccccctccgggtgcagaggcctacattccacagagataccccgacaatagaatcgtctcctccaagtacacattctggaacttcatacccaagaacttatttgaacagttcagaagaatagccaacttttatttcctcatcatcttcctggtacagttgatcatcgacacacccacaagtccagtgacaagcgggctcccactcttcttcgtcatcactgtcacggccatcaagcagggctatgaagactggcttcgccacaaggccgacaacgccatgaaccagtgtcccgtgcactttatccagcatggcaagctggtccgcaagcagagtcggaagctgagggttggggacattgtcatggtgaaggaagatgagacctttccctgtgacctgatctttctctccagcaaccgggcagatgggacatgccatgtcactacagccagcttagacggagagtcgagccataaaactcactacgcagtgcaggataccaagggcttccacacagaggcggatgttgacagcttgcacgccacgatcgagtgtgaacagccacagcctgacctctacaagtttgtggggcgcatcaatgtttacaacgacctgaacgaccctgtagtgaggcctttggggtcagaaaacctgcttctcagaggagccacactcaaaaacacagagaagatctttggtgtggctatctacacaggcatggagaccaagatggccctgaactatcaatccaagtcccaaaagagatctgctgtggaaaagtcaatgaacacattcctgatcgtgtacctctgcatcctggtgagcaaggccctgatcaacacggtgctgaagtacgtgtggcagagtgagcccttccgagatgagccatggtacaacgagaagaccgaatccgagcgccagaggaatttgttcctcagggccttcaccgacttcctggccttcatggtcctcttcaattacatcatccccgtatccatgtacgtcaccgtggagatgcagaagttcctcggctcctacttcatcacctgggatgaggacatgtttgatgaggaaatgggggaagggcctctggtcaacacatctgatctgaatgaggagttgggacaggtggaatacatcttcactgacaagaccggcacgcttacagagaacaacatggccttcaaggagtgctgcatcgagggccatgtctacgtaccccatgtcatctgcaatgggcaggtccttcccgactcttctggcattgacatgatcgattcttcccccggagtctgtggaagggaacgggaggagctgtttttcagggccatctgcctgtgccacactgtccaagtgaaagatgaccattgtggggatgatgtcgatggtccccagaaatctccagatgcaaaatcctgtgtgtacatatcgtcctcgcctgatgaggttgcactggtcgaaggcgtgcagaggcttggattcacgtacctgaggctgaaggacaattacatggaaatactgaacagggagaacgacatagagagatttgaattgctagaagtgctgacctttgattctgtgcggagaagaatgagtgtgattgtaaagtctactacaggagaaatttatctgttttgcaaaggagcagattcttcaatatttccccgagtgatagaaggcaaagtagaccaggtccggtctagagtggagcgcaatgccgtggaagggctgcgaaccctgtgtgttgcatacaagaggctcgagccagagcagtacgaagatgcttgccgactgctacagagtgccaaagtggcgcttcaggaccgggagaagaagctggcagaagcctacgagcagatagagaaggaccttgttctgcttggtgctacggctgttgaggacaggctccaggagaaagctgctgacacaattgaggcactacagaaggcaggcatcaaggtctgggtgctcaccggggacaagatggagacagcatccgccacctgctatgcctgcaagctgttccgcaggagcacgcagctgctggagctgaccaccaagaagctagaggagcagagcctgcacgatgtgctcttcgacctgagcaagacagtgctgcgctgcagcgggagcatgaccagggactccttctcggggctctccacagatatgcacgactatggtttaatcatcgatggagcggcactgtccttgataatgaagccgagagaggacgggagctcctcgggcaactaccgagagctcttcctggagatctgcaggaactgcagtgctgtgctgtgctgccggatggcacccttgcagaaggcccagatcgttaagttaatcaaattttcaaaggagcatcctattaccttagcaattggtgatggtgcaaatgatgtcagtatgatcctggaggcccacgtgggcataggtgtcatcgggaaagagggtcgccaggctgcaaggaacagcgactatgcaatacccaagtttaaacacttaaagaagatgcttcttgttcatgggcatttttattatatcaggatatctgagcttgtgcaatacttcttttataagaacgtctgcttcattttccctcagtttttgtaccagttcttctgcggattttcacagcagactttgtacgatactgcgtatctgactctctacaacatcagcttcacttccctcccgattctcctgtacagcctcatggagcagcacgtgggcattgacgtgctcaagagagacccgaccctctacagagacattgccaagaatgcgctgctgcgctggcgggtgttcatttactggacgtttctcggcgtttttgacgctttggtatttttctttggtgcttatttcatatttgagaacacaaccgtgaccatcaacggacagatgtttgggaactggaccttcgggacgctggtgttcactgtgatggtgctcactgtcacactgaagctcgcactggacacgcactactggacttggatcaaccactttgtcatctgggggtcgctgctcttctacattgccttctccctgctctggggaggggttatctggccgttcctcagttaccagaggatgtactatgtgttcatatccatgctgtccagtgggcctgcctggctgggtatcatactgcttgtcacggtcggcctcctccctgacgtcctcaagaaggtcctgtgtaggcagctgtggcccacggcaacggagagaactcagaacatacaacatcaggacagcatttcagaattcacccctctggcctctttgccgagctggggtgctcagggcagcagactcttggctgcccagtgcagctccccctctgggagagttgtgtgctccaggtgggagagcgaagagtgtcctgtgctccctctccacccaggccttcctcacaaggcaaggtatgggtgctgtaggtccagcctggagatgcccacttgatggacagacagccccagtgccccagc

SEQ ID NO: 87 - DNA, 1849 bp, Mus musculus
cgcggctccgcgctcggggcggggagctggcccagcgtccggagctgctcggtcaggcccgagccagacggcgggccggtcccgcaccatgggccggatggtggctctgagtttgctgggcatcgggctggcgctgctgggcgagcggttcctagcgctcagaagtcgacttaaagcctccagagaagtagaatctgtagaccttccaaactgccacctcattaaaggaatcgaaactggagctgaggacattgacattcttcccaatggcctggctttctttagcgtgggcctcaagtttccagggctccacagctttgcaccggataagcctggagggatactgatgatggatctcaaagacgagagaccgagggcgctggagttaagagtcagctggggctttgatctggcttcgtttaacccacatggcattagcactttcatagatgacgatgatacagtttatctctttgttgtaaaccacccacaattcaagagtacagtggaaatttttaaatttcaagaagaagaaaattctctgttgcacctgaaaacaattaaacacgagctccttccaagtgtgaatgacatcatagctgttgggcccacccacttctacgccaccaatgaccactacttctccgaccctttcttgaagtatttggagacatacttgaacctacactgggcaaatgttgtttactacagtccagaagaagttaaactggtggcagaaggatttgattccgccaacgggatcaatatttcacctgataaaaagtatgtctacgttgctgacatactggcccatgaaatccatgttttggaaaaacaacctaatatgaatttaactcaactaaaggttctgcagttgggcacgctggtggacaatttatctattgatccttcctcgggcgacatctgggtcggctgtcaccctaatggacagaggctcttcgtgtaccacccgaaccatcctcctgcatcagaggtcctccgcattcagaacattctatccgagaagccatcagtgacaacggtgtatatcaacaacgggtctgtcctccagggaagttctgtggcgaccatatatgataggaaacttctcgtaggcactttataccagaaagccttgtactgtgaactctaaattgtatttttggcatgcaagtgcactaggttgtaacaaaataatcttttgattaagggccaattctgagggaatttaaccatcagtactgacctagtaatataccacatttgtagctccttttatttcaataaggaaaggccttgcaattctgatgcgcttttagcatcaaaagaaaatgaactatattattggctgtgtgtgtgtgtgtgtgtgtgtgtgtgtgtgtctgttttctgctgatccagggagaaagaagaaagctgcttttctatgaagtgaacgcagtttgcacagaggggcttccccctccgtgcctccaccacgtaagagtccactgaagcagggagtgtggtaaacaggtctgcgcctcggtctccaggctgcgcctgctgggcttgtgcaggactactgatagataacacttggatgttttctacatccggctttgtttactgatttacaagttaggagtgtattcaagactaatcaaaatccggggagttgtttgtgtttaattcccaagggaaatcctctggagagggtgaggctagaagtgactcctagggcattcggttggacaggaatcaatggccatgttaatttctcatgaaagctctatgtaaaggggctctttattggaaaaataaaataaaacaaccgaatactgtagctcaaaaaaaaaaaaaaaaaaaa

SEQ ID NO: 88 - DNA, 1661 bp, Mus musculus
attcggcacgagctgagacttttgctcagcgccttccaacctcctcccgagctcttcccggctgggcctgtggcttcgaagttttttgttttgttttgttttgtttttcatcttttcacaacccacaaaaaaacccactagctgctgaggctccaacgagatcaagatgtggaccgtgccagtgttgttctgggttttggggagcgtttggttctgggactctgcgcagggagggactataggcgtgaatgaagatgatattgtgaccccaggtacaggagacggcatggtgcccccaggtatagaagacaaaataacaaccacaggtgctactggagggcttaatgaatctactggcaaggcacctctggtaccaacgcagagagagcgtgggacgaagcctcccttagaggaactgtccacctcagcaacctcagaccatgatcacagagaacacgagagtacaaccactgtcaaagtggtgactagccactctgtggacaagaaaacaagtcaccccaatagagataatgcaggggatgaaacgcagacaacagataagaaagatggcttgccagtagtcaccctggttggaatcatagttggcgtcttgttagccattggcttcgtcggagggatcttcattgttgttatgaagaagatttctggaaggtctcgccctaaagagctaaacagaacaggttgttctcccaacacatctgaaaataagagagcttccaacttgccctgttccccatcctcttcctgtggaggaagatgacccatggcgtgcccacccaccccacccacagccatggtgacccctccgcttggccagcagtaccaaaggaaagatacaggacaagccacagcccctcaaagcatctgcctttggaaaactaaatttttaacataaatgttatgatcgatgattcaaaagacaacatgcttagaaaatggagcaaagccaagacagtatcgccagctttagcaactgtaaccatgggttcaccctggccagtccctattactgttaagaggcatagagtctggaaatgttacatcacagaggcatgggtccttttgcagttgccaacttgtaactgcacttgatacatacacattccagcccagtcctaagcatccactgtgccttcagttccgggaagacactgcttttttttttttttttttttacaagtctccaaaccatctctaagcctccgatgagttgaggagccacgtcctcatctccctaggactcaagccctcagatcagctgcatctttctggataatagagacctcatcctggatgctgagaacactgttggatgtcacaagatgctaaaaggctcagccgctgtagaaccaagaacatttcagtagaagtgactcatgttggctttagtataggaagtcagaccgaccagtttctaacacctgccttctgcttctcaggacagacagggaaagcaaaaataatcttgtataatcttaactgcttttatggggtggatgtaaaggtttgcggttaatagaagatatttccagtcttcgtgacacggggactcagtgttgctgggacagagctgtagtgtcttggtcgtctgtgttggtacccaatacagtgtagacatcttttcaaataaaacctcgtgc

SEQ ID NO: 89 - DNA, 1480 bp, Mus musculus
gccgcaggctgcccacacaggccgcccgctgttttcccttgctgcagacatgctgtggatctgggctgtcctgcctctggtgcttgctggctcacagttaagagttcatactcaaggtactaatagcatctccgagagtttaaagctgaggaggcgggttcatgaaactgataaaaactgctcagaaggattatatcaaggaggcccattttgctgtcaaccatgccaacctggtaaaaaaaaagttgaggactgcaaaatgaatgggggtacaccaacctgtgccccatgcacagaagggaaggagtacatggacaagaaccattatgctgataaatgcagaagatgcacactctgcgatgaagagcatggtttagaagtggaaacaaactgcaccctgacccagaataccaagtgcaagtgcaaaccagacttctactgcgattctcctggctgtgaacactgtgttcgctgcgcctcgtgtgaacatggaacccttgagccatgcacagcaaccagcaatacaaactgcaggaaacaaagtcccagaaatcgcctatggttgttgaccatccttgttttgttaattccacttgtatttatatatcgaaagtaccggaaaagaaagtgctggaaaaggagacaggatgaccctgaatctagaacctccagtcgtgaaaccataccaatgaatgcctcaaatcttagcttgagtaaatacatcccgagaattgctgaagacatgacaatccaggaagctaaaaaatttgctcgagaaaataacatcaaggagggcaagatagatgagatcatgcatgacagcatccaagacacagctgagcagaaagtccagctgctcctgtgctggtaccaatctcatgggaagagtgatgcatatcaagatttaatcaagggtctcaaaaaagccgaatgtcgcagaaccttagataaatttcaggacatggtccagaaggaccttggaaaatcaaccccagacactggaaatgaaaatgaaggacaatgtctggagtgaaaactacctcagttccagccatgaagagaggagagagcctgccacccatgatggaaacaaaatgaatgccaactgtattgacattggcaactcctggtgtgttctctttgccagcaaatggtagttgatactcagtgagggtcaaatgactagcaggttccagggactgcttctgttattctctgcagttgctgagatgaaccattttctctgtctactgcaatttttacattcaaatgtccatgaaatttgtattaaatgtgaagtggaatctgcagtgtttgtgtttatattcatatactatgaactgaggagaattataaactgaaacaaatactcgcagttaattgaagaccttccattgatggacagttcttttcctctctatatggaaatgtataatagaagaaataatttttaaattaaagtatctctttttgcatttca

SEQ ID NO: 90 - DNA, 4173 bp, Mus musculus
cttaacctgaccagaccaaccagtccccatctcttcatcaataccgagggaccgttcaaggggacgccgcctggagccaggtccctttgttgggcgcgcgtcccctaccagtggtagcgacaaagtccagcagcgggagccggcgcgaggggcggggactgacggtggggacagcgaggccaaaaagtggggagtagggaaaaccaagccggctgcgcgcggggaccagtagcaagggcagcgggctctgaagtatgcaaagagactccacgcgggcccagccactcgcggaaatccgacatcgcagaagtttggtggctgctggccgggtggcgtcgatgacctggcgcccagccggccgcgggggctgagcggccgcctcttcctctctggtccggcttttgtgtctcgcgtcttctgctcatgccgtgtccagctacttctcgcggtggccgttgctgagctgtccgacgcagccgaggaccgaggacacgacggctcccgccgccgcagcgcggggcacaggagggactatgggaaacgggatgtgctcccgaaagcagaagcggatcttccagacgctgctgcttctcacggtggtcttcggcttcctctatggcgcgatgctctacttggaactgcagacgcagctgcgcaaagctgaggcagtggcgctcaagtaccagcagcaccaggactctctctctgcccagttgcaagttgtatatgaacacagatcaagattagagaaatctttgcaaaaagaaaggcttgaacacaagaaagcaaaggaagatttccttgtttataagttagaagcacaagaaacacttaacaaaggaaggcaagattccaatagcagatatagtgcattgaatgtccaacatcagatgctgaaaagtcagcatgaggagctgaggaagcagcacagtgacctggaagaggaacaccggaagcaaggggaagacttcagtagaacgttcaatgaccacaagcagagatacctgcagcttcagcaagaaaaggaacaagaactttctaagctaaaagaaactgtatataatttgagagaagagaatagacaactaagaaaagcacaccaagacattcacacacagcttcaagacgtcaagactcaagttgcagaatataaacaactgaaagatacactgaacaggattccaagctttcgaaatcctgacccagtcgagcagcaaaatgtcacctttccccatgggactcaccctcctcaaggttacaacggaagagagaagctgacaggagagctccaagaggtgcagccgaatcacgaagcagggcctagaagaatggaagagaaacctctgtcttccatgcagaaggatgcaggattccaggctctagaagagcagaatcaagtggaacccagagagccagaggagcgtcaagtggaagaggaacacaggaaggcactggaggaggaggagatggagcaggtggggcaggcggagcatctggaggaagaacacgacccatcaccagaggagcaggatcgagactggcgggatcagcagggacagaatgcagcccaccttctggatggccaccctcaagctgaggtggagcattcgaccaaggcagctacaaacttccaatccccatatgaggaacagttggaacagcagaggctggcagcgaggagagatgaggaagcccagcggctgagagaacatcaggaagccttgcaccaacagaggctccatgggcagttgctaagacaacagcagcagcaacagttcctggccagagagatggctcagcagaagcaggtagcccatgaagatggccagcagcagcaccaggagcagctaaggcagcaagctcattacaatgctgtggagaatgacatcgcacagggagtcgaggaccagggaatccccgaagaagagggaggtgcctatgacagagataaccagcgccaagatgaagctgaaggagacccaggcaacagacaggaacttcgtgaaccaggacaccaagaaggcgaccctgaagttgaagcagatagggcagctgtggaggatataaacccagcagatgaccccaacaatcaaggcgaagatgaatttgaggaagccgagcaagtgagagaagaaaatttgccagaggaaagtgaagagcaaaaacaaagcgaagcaaagcaagggaatgtagaaatggatgagcacttggtgatggcagggaatccagaccagcaggaggataatgttgatgagcagtatcaggacgaaggagaggaagaggttcaggaagatctgactgaagagaaaaaacgggaaatggagcataatgttgaagagacatatggtgaacatcctgatgataagaataatgatggtgaagaacaaggagttcacaacagggcgcatcctaaaggaagacaggagcattatgaggaggaggaagatgaagaagacggggctgctgttgctgagaaatcacatcgcagagctgaaatgtaactggactcagtttctagactgtgctcagccaacgatttttttctcaagctgctctaaaacaaatcccgcctactgaattctagagtatttaattacatacagaagtaagggtttagacttttttaacttttttattagaaatgctatacatttatatgaatatattttgataccttaggtgagaacttcttttatagtcgagttatacatggacaagaagaaaagcagtaagacttgccttcaggtctgaatctcatttcccagcgatggtgggaagatgtgcttggctttggtgcatgtctcagctcagtaccattttgttttctggcttccgggtagtctactatttatctcagataaaatgcaagatatagaaaaaaaaaggtgtatggaaaaacaatatgcaaacatcaggggaatggctggtgtcctcgtggctgttcttgcaggttcttgtatacagctctgaaagaatgtcactactgcagagtgttggcaaatgagagccatctgtacagttgaaaatcaattggaaagcccgtgtgtctgtgtcggtgtgtgtgcgtgcgtgtcaggacaaagttttttttcaaactttcaggtcactttgaataatacgtagcaattcttaaaatcacagctatcttgcttgggaggaatcacgtatgaaagttggataatattaatacccctatgaaagtctcaaggactctgtcttgtcagagaggccaaaggagctgacacacttagaaatagatgcagtatgttcagtgatgcttcctgggtgaactccccgtctccccatcggttatctgcttgctcgtcagtctccacttgctccagcatattttcctctcttaagctctgtgccttgatgtggaaccatttggttcacagttatggataggaaagcatgcgaagctacagtttaataggattatttttcagactatatgataaaataactatagcactaggataggcacccctcccttagcggctttactatttacccagaattgacctgcctttgcctatgtatgaggcattctaatggctatcaagaataatgcatcctttaaaagaaaactcaaactgaaaggttttccctgaaatgagcacatattttagtttacatcatcaatattgttaaatacattgaactgggccaccgttaatctgtgtgtggtactttcaaaataataaagcaaatttcattttctgttattatcatatgagtgtaattttagtttctaataaccacaatcatgtatggttttgattttcccagctgagcaattgtgtatgtatgcataggaaatgttccgctcaaatttagtttggatttccagtaacaataaatcaaatctcatctttatgtataaaagccccatatgtaatgtaaaatgtattatattgtacataaatactcagaatacaattattttggtaaattagtttgtatttttaatgtccctttgcagtatttaattatttgaaacacattgaaacttgggtaataatcaataaacttataaaaagttaaggataagtcttttaaagcatataatttcttagtgctttgttatctatggtttttctttataggacaatataaattaatgaattattaaatgcctttcccaaaaaaaaaaaaaaaaaaaaaaaaaaa

SEQ ID NO: 91 - DNA, 2471 bp, Mus musculus
aaaatctggaacttcccgggttactacagggtctatgtcacagtgcctgtgagagaggacagagcactctgcagccagcctcagaggcaaagctgaccagcattgaaaagctgcttcttcttcttctctaaaggatttctcttcagagacaaaaagaaaccaccctggacatggcctcagagatccacatgtcggaacccatgtgcctcattgagaacactgaggctcaactagtgatcaaccaggaggctctgaggatcctgtctgccattacacagcctgtggtggtggtggcaatcgtgggcctctaccgcacaggcaaatcctacctgatgaacaagctagctgggaagaggacaggcttttccctgggctccactgtgcagtctcacaccaagggcatctggatgtggtgtgtgcctcaccccaagaaggcagggcaaaccctggttctgcttgacactgagggccttgaagatgttgagaagggtgacaaccagaatgactgctggatctttgctttggcagtcctcctcagcagcaccttcatctacaacagcataggaaccatcaaccagcaggccatggaccagctgcactatgtgacggagctaactgatcttatcaagtcaaagtcatcacctgaccagagtggggtagacgattccgctaactttgtgggcttctttccaacctttgtgtggactctgagagatttctccctcgagctggaggttaacggaaaacccgtcacttctgatgagtacctggaacattccctgaccctgaaaaaaggagctgataagaaaactaaaagctttaatgagccgcgactgtgcatcaggaaattctttccaaagaggaagtgcttcatctttgacaggcctgctcagaggaagcaacttagcaaactggagactctgcgggaggaggagctgtgtggtgaatttgtagaacaagttgcagaattcacctcatacatcttgagctactcttctgtcaagactctgtgtggtggcatcatagtcaatgggccacgtctaaagagcctggtgcagacctatgttggtgccatcagcaatgggtctctcccctgcatggagagtgctgtgctgactttggcccagatagagaactcagcagcagtgcaaaaggccatcacccactatgaagaacagatgaatcagaagattcagatgcccacagaaaccctccaggagctcctggatctgcacaggccaattgagagtgaggccattgaggtcttcctgaagaattctttcaaggatgtagaccaaaagttccagacagaattagggaacctgctggtagccaagcgagatgcctttatcaagaagaacatggatgtctcatcagctcgttgctcagacttgctggaggatatttttggacccctggaagaagaagtaaaattagggacattttctaaaccaggaggttactacctcttccttcaaatgagacaagagctagagaaaaagtataaccaggctcctgggaaggggctccaggcagaagcgatgctgaaaaactactttgattccaaggcagatgttgttgaaacacttctacagacggatcagtcactcacagaggcagcaaaggaggtagaagaggaacgtacgaaggctgaagctgctgaagctgcaaacagagagttagaaaagaagcagaaggagttcgagctgatgatgcagcagaaggaaaagagttaccaggagcatgtgaagaagctgactgagaagatgaaagacgaacagaaacagttattagcagaacaggaaaacatcatagctgctaaacttcgggaacaggaaaaatttcttaaggaaggattcgagaatgagagcaaaaaacttattcgagagattgataccctgaagcaaaacaaatcgtctgggaagtgcactatactctgaaggcccaaggcccaaacctctctgccaagctctctccatcacacactatgttgactgagcatcttcaggctttgaaacaactgctatgaaactcaattcacctcagctcaaaatcaatcatatgcgactccattttggggtcactgtctgaccactgggcactgtcagaggaagtccctctgtgtgcagaatgcatgtatgagcagaggttcagtcacctgtgttataggtactctcggccttcatcatgcccagccatacgtttctcctgtataatcttaagtgttcctctttcctacagatagcttctgtaatcacagaacaggcaacttttaactaacttgcaaaatgaattccctttcatttctctgaggactttttctactgttattccaaacctaaatctcatcccaggtttcccttttatctccccactgtgacaacatgtcttgaaattactcaagacaaatgtcttgcaagagcacaagttaataaaaatgattagcccactgtaaaaaaaaaaaaaaaaaa

SEQ ID NO: 92 - DNA, 2987 bp, Mus musculus
cgccctagcgcaggcacggtccccgctgcgccacgcctgacccccggccatcctctcagcaatgagggtcctgagcgcacgctttcgggtgctactggcctgcctcgccctggtgatccctgtctcagagacaaacttcttgtccaaagagcgtgcttcacaagtcctggtgaggaagcgccgtgcaaataccttgttcgaagaaactatgaagggcaaccttgaacgagagtgcattgaagaactctgcaataaggaggaagccagggaggtctttgaaaataatcccgagacggattatttttatccaaaatatttaggttgtctgggggcattccgtgttggctcattccatgctgcgaggcagtcagctaatgcttatcctgacctcagaagctgtgtcaaagccatctcagaccaatgtgaccctataccatgcaatgaagatgggtatctggcctgccaagatggccaagctgcttttacttgcttctgtaagcccggctggcaaggagacaggtgtcagtatgatgtaaatgaatgtaaagatccctcaaatgtcaatggaggctgcagccagatttgtgacaacactcctggaagttaccactgctcctgtaaaagaggctttgctatgctcccaaataagaaagactgcaaagatttggatgaatgcgctctaaagccaagtgtctgtggcacagctgtgtgcaagaacattccaggagacttcgaatgtgaatgtcccgacggctaccgatatgatccctcatcaaaatcttgtaaagatgttgatgagtgctctgagaacatgtgtgctcaactgtgtgtcaatttccctggaggctactcttgttactgtgatgggaagaaaggattcaaacttgcccaagatcagaagagttgtgagggtatcccagtgtgcctttccttggaccttgacaaaaactatgaattattatacttggccgagcagtttgcaggagttgtcttatatctgaaatttcgattgccagatatcacgaggttttcagctgaatttgattttcgcacatatgattcagagggcatcatactgtatgcagaatctctcgaccactccaattggctcctgattgcgcttcgtgatgggaagattgaagttcagtttaagaatgagttttcgacccaaatcacaactggaggcaatgttattaacaacggtatatggaatatggtgtctgtggaagaattagacgacagtgttagcattaaaatagctaaggaggccgtgatgaatattaataaacttggcagcctttttaagcctaccgatggatttctggacaccaaaatatacttcgcaggcttacctcggaaggtggaaagcgcactcattaaaccgattaatcctcgtctggatggatgtatacgaggctggaatctgatgaaacaaggagctttaggtgccaaggaaataattgaaggaaaacaaaataaacactgcttcctcaatgtggagaagggctcctactaccctggttccggaattgctcagttcagcatagactacaataatgtaactaatgcagagggttggcaaatgaatgtgaccttgaatatccgcccttccactggcactggagtcatgctggctttggtttctgggggcacagtgccctttgccttgtccttggtggattctcgctctggaacgtctcaggatattgtggtatttgttgaaaattcagtggtggctcgattggaggcggtatctctgtgctcggatcagcaatcccaactgaaatgcaatgttaacagaaatggactggaactgtggaccccacttagaaaagatgtcatttactctaaagatcttcaaaggcaactcgccgtcttggacaaagcaatgaaaagaaccgtggccacttacctgggtggcatcccagatatttccttcagtgccacaccagtgaatgccttttacagtggctgcatggaagtgaacatcaatggggtgcagttggacctggatgaagccatttctaaacataaggacattagagctcactcgtgcccgtcagtgaggaagatccagaagaatttttagactctgtttcctgttcttctaatatctcttttctcgttgtaattatgctcacattcctatcaccagctggcaggtgttacctgtgacgtgcaatgtttaaatatgacgtggtactttgtccttcagatttttgttatataaatcacatttttgaaaagtcttgcactcattgctgtctagaaattaaataatgaaacacatgaaacacttaaatttcaatttatttcctataaatgacactgctttttttgtttttttgttttgttttgtattgttttgttttcttttaaaagtaagacttatcatcatggaactagtatttaaatgtcctgtttttctcagaagacgaatcagtttaaacccaaacaaaagtccacgtgactaaatgctaacagttgcagggaaacactgtatttttgttgttgttttttgtctgtgaaagtggcagagctgatagcatatcacaggtgaattgaatggaaggtctcgaagctctatttcaaagtatttcctttgactgaggcgcgtagctcctttaggcttcatttttcttttacctggctttccacttgagccaacaccttcactgaaatatagaacaagggcagattttccacgggagcagcacatgaatgttgtctcaatcaggtttctatcagagacatcaggttatgctgtaagaggtgtgaacattgggtggacagatcactcaacctaagctgctgagagcacacaaggtcagagtcagaatggcggccatccttaatggtgggaaggagggtgaagccatcaagaagttcatagttgtctttcatattgggttttaattactataggtggcttgaatgtgattgttaaagttaaaaaagtgatggaaagtagagtagatttttaacaa

SEQ ID NO: 93 - DNA, 2005 bp, Mus musculus
tggggcagcgagcagggcagccggtcccagtccagagcgacccggagcctccgcgggactcgagtcctagcgaacctcgaagcatcatccgcgtccgtctgcggcgttcgggcttctccggcgccgcgcaggggagcgagctcgtgcatcacccgcgcggccgccgctggggctaagagcagggacaccgagggtgactgaccgctagaactcttccagtcgtccaaacagccatgacccacttcaacaagggcccttcctacgggctctccgccgaagttaagaacaagattgcatccaagtatgaccagcaggccgaggaagatctgcgcaactggatagaagaggtgacaggcctaggcattggcaccaacttccagctggggctgaaggacggcatcatattgtgcgaactcataaacaagctacagccaggctctgtgaagaaagtcaacgaatcctcactaaattggccccagttggagaatatcggcaacttcattaaagctatccaggcttacggtatgaagccccatgatatatttgaagcaaacgacctctttgagaatggcaacatgacccaggttcagacgacgctggtggctctagcaggtctggcgaaaacaaaaggattccatacaaccattgacattggcgttaagtatgcagaaaaacaaacaagacgttttgatgaaggcaaattaaaggctggccagagtgtaattggtttacagatgggtaccaacaaatgtgccagccaggcgggcatgacagcctatgggactcggaggcatctttatgatcccaagatgcagacggacaaaccctttgaccagaccacgattagcctgcagatgggcaccaacaaaggggccagccaggctgggatgttagcaccgggcaccagaagagacatctatgaccagaagctgacattacagccagtggacaactcgaccatttctctacagatgggcaccaacaaagttgcttcccagaaaggaatgagcgtgtatgggcttgggcggcaagtatatgaccccaagtactgtgccgcacccacagaacctgtcattcacaacggaagccagggcacgggcaccaatgggtcggaaatcagtgatagcgattatcaggcagaataccccgatgaatatcatggcgagtacccagacgactaccctcgggagtaccagtatggcgacgaccagggcattgattattagagtcacacacaggagcgcagtatttagtccattgttttatccagtgagacccaagctagccttgaataattcttctctcgtcttcctgaaacactattatgcttgttgtacctttaaagtatgccttatgtacattcctttctccttttcctgcctcctccctaaatagctgccttctagtgctgtagcaagggagccctactgcatagccagtaactcgcgtctgtaccatggaaagggcggaacgattctccaggacagccagctctttcgttgaagatctatctatgcatttttttacacttacacataaactggtattttcgaacaataggaaactattttttctcctttttttacagttttagtacgtatctggcttgtatgtggaagactaaaaagttgatttgctaaatgtggtctttgccaactaaaatctgagatgcagctttagaccctgacacgtggatgttcttctgcagtcttgtctgctaagttttaaataaagtcatgatcagtgtgcatttgtgattacatgtgtactcattcttttcccaagctgacgaggtctctcccgagtggcgcttcgaaaggcgtgcatgcagaaatggccgaggacatgcaggtttgggtggtgtgcctgcagacttcatttgtgccaatgtattactgtagagtcgctctgtttccttcaactgtatttattgctgcgtttctcagcataaacttatcccattgtattttttataaataaatatttttttttgaacattcatatg

SEQ ID NO: 94 - DNA, 3064 bp, Mus musculus
ggtgcggctgagtctagctgtgaagctgggtggtgggtggcaatgtggctccgccgccggggtttgggggtgccctccgcctctgcctctgagggcggcacgtcctcccctgcgtggactgagatggggtcttgggtgcggacgatctgcgggaggctgaagcagcggctgcggctggacgtggggcgcgagatttgccgtcagtatccgctgttctgctttctgctgctctgcctcagcgtcgcctcgctgctcctcaacaggtatctgcatgtcttaatgatcttctggtcgtttgttgctggagttgtgacattctactgttcattaggacccgattccctcttaccaaatatattcttcacaataaaatacaaacccaagcaattaggacttcaagagttatttccgcaaggacatagctgtgctgtttgtggtaaagtgaaatgtaaacggcataggccttccttgctccttgaaaactatcagccctggctagacctgaaagtttcttcgaaggtagatgcatctctctcagaggttcttgaattagtgttggaaaactttgtctatccatggtacagggatgtgacggatgatgagtcctttgttgatgagctgaggatcaccttacggttttttgcatctgtcttggtgcgaagaattcacaaggtggatattccatctattataaccaagaaactattaaaagcagcaatgaaacatatagaagtgattgttaaagcaagacagaaagtaaagaacacggagtatttacaacaagccgctttagaagaatatggtccagagcttcatgtggccctgagaagtcgaagagatgaattacagtatttaaggaagcttactgagttactttttccttatattttgcctcctaaagcaacagactgcaggtccctgacattactcataagagagattctgtctggttctgtgcttcttccttctttggatttcctagctgatccagatactgtcaatcatttgcttatcatcttcatagacgacagccctcctgaaaaagcaactgaaccagcttcccctttggttccattcctgcagaaatttgcagaacctagaaataaaaagccatccgtgctgaagttagagctgaaacaaatcagagaacagcaggaccttttgttccgctttatgaacttcctgaaacaagaaggggccgtgcacgtcctgcagttctgtctgacagtcgaggaatttaatgatagaattttgcgtccagagttatcaaatgatgaaatgctatctctccatgaagaattgcagaagatttataagacctactgcttggatgaaagcattgacaaaattcgctttgatcccttcattgtcgaagagattcaaagaattgctgaaggcccatacatagatgttgtgaagctgcaaactatgaggtgtctttttgaagcatatgagcacgtcctttccctgttggagaacgtgtttacccccatgttctgccacagtgatgagtattttaggcaacttttaagaggtgcagaatcgcccacacgcaattccaaattcaacagaagcacacaaaaaagaggagaatcgtttggaatcagcagaataggtagcaaaattaaaggcgtattcaagagtacgacaatggagggagctgtgctgcctaattacggggtggctgaaggcgaagatgactttattgaagaagggattgtggtaatggaggatgactctccagtagaagctgtgagcacacctaacactcctcgaaaccttgctgcctggaaaattagcattccgtatgtagacttttttgaagatccctcctctgaaaggaaagagaagaaggagagaattcctgtgttttgtatcgatgttgaaagaaacgacagacgagcagttggacacgagcctgagcattggtctgtctatagaagatatcttgaattctatgttcttgaatcaaaactaacagaatttcatggcacatttcctgatgctcagcttccatccaaaaggatcattggccccaaaaactatgagtttttgaagtcgaagagagaggagttccaggagtatctgcagaaacttgtgcagcacccggagctgagtaacagccagcttctggctgactttctctcccccaacggtggggagacacagtttctagataagatacttccagatgtaaatcttggaaaaattataaagtctgttcctgggaaactaatgaaagagaaaggtcagcatttggagccattcatcatgagtttcattaattcttgcgaatctcccaaacctaaaccgagtcggccagaactgacgattctcagccccacttccgaaaacaacaagaagcttttcaacgatctgtttaagaataatgcaaaccgcgctgagaacacagagcgaaagcaaaatcagaactacttcatggaggtgatgactgtggacggagtctatgattacctgatgtatgtagggcgagtagtttttcaagtcccagactggcttcatcatcttctaatgggaactcgaatcctctttaagaacaccctggaaatgtacacagactactacctccagtgcaagctggagcagctgtttcaggagcaccggctggtctccctcatcacccttctcagagatgctatattttgtgaaaatactgaacctcgctctctccaagataagcaaaaaggagcaaaacagacttttgaagaaatgatgaattacattccagatctgatagtcaagtgtatcggtgaagaaaccaagtacgaaagcatcagactcctgtttgatggcctgcagcagccagtgctcaacaagcagctgacctatgtgttgctggacattgtgatacaggagctgtttccagagctaaataaggtacaaaaggaagctacctccatgacatcctggatgtaaacacttggtatagaataacataccagaataatagaaatgtacttttcactttgtatatttttataaatatcatgtactttagtgtttggaatatattttttgttttaataaagactaacaaatagcg

SEQ ID NO: 95 - DNA, 4434 bp, Mus musculus
gagggagcgcgcgcgccgccgcggggccaggccgagcgctgctggtggcgtccgaggctgaaggcttggcgagaagggcttgcggccgcgtgtcgggctgttggtattgtggctgccgaggccgcccgctcctggtcatgagaggagaaagagtcctgaagcaaagacattttagagagaaaatactcaagggccatgcaagccagctgtaaccaactgcatgatcctccgggcactgcacatgaagatgctgcagcctccccgtgtggtcattcaagatcaacagaaggttcccttcaccctggggatgtacatatccaaataaactccggaccaaaagaatattctgaaaatccaagctctagaaatcccaggtcaggcgtctgtacttgtgcccatggatgtgtgcatggtcgtttccggagttactcccacagtgaagcaagaccacctgatgactttgctacagagtctggggaacatggaagtggctccttctcagaattccgctatctcttcaagtggttgcaaaaaagtcttccttatattttaattctgggtattaaacttgttatgcagcatataacaggaatttctcttggaattgggctgctaacaacttttatgtatgcaaacaaaagcattgtaaatcaggtttttctaagagaacggtcatcaaagctccgctgtgcttggttactggtgttcctggcaggttcctccgtcctcttatattacacttttcattctcagtcacttcattacagcttaattttcttaaatcctacactcgaacagttgagcttctgggaagttctttggattgttggaattacagacttcattctgaaattctttttcatgggtttaaaatgcctgattttattggtgccttctttcatcatgccttttaaatcaaagggatattggtacatgcttttagaagaattgtgtcagtattaccgaatttttgttcctataccagtttggtttcggtaccttataagctacggggagtttggtaatgtaactacatggagtcttgggatattgctggctttactctacctcatactaaaacttttggacttttttggacacttgagaactttcagacaggtcttacgagtattttttacacgaccgagttatggagtgcctgccagcaagagacagtgttcagatatggatggtatttgtacaatatgtcaagcggaatttcagaagccagttcttctcttttgtcagcatatattctgtgaagaatgtatcaccttatggtttaacagagagaaaacatgtccactgtgcagaactgtgatttcagaatgtataaacaaatggaaagatggggccacttcatctcacctccagatgtactaagttgttccaactattaaggcctcaagacactaattttatctgtttggtaactattgataaaggtataattgatctccagcagtagaaaaaggctttagggtatcacgagacatgtttatagttcagtttctcagaagtttaagtgcaagagccctgcatttttaaactatatattcattcaccttaataaatatgcaacatttattccacttatttgacaaataattgcagtgttaaattggaaatgtgatttcttatcaataataccaaaatagcaattagaaatagaactagccattttaaaggggttcaggtactgtttcctgacaggttttcagaataaagattttgcatagtattttaagatatatagtatctgaaacaatttacagatttttataattcccattctaaaaatgcttaaatttttcataagattgtatttttaaatgaaagttctaaatgctatattttacctataacaatcacattttctaagtgaagatttactgaggatgatatattttaatactgtattatgctctataatatgactagtaatcagtgagaataaatgatttagattcattcacctggtggacctgttatgtactccttgccactagctgtcttgtgttttgtgtagtaccatgtaatagcttgaaataacaatgaaagtgatttgaatgtgggctggggatgtagctcacaagttttacaatcaccacctgttgagatatgaaagcttgcacccaaggctgtggtggagtgcctgcttagtgcgcactgtgtcctggctgaattccacatcgaggagaaagggagaaaacagcaactttcactcaggggaagccagaacattagtcatctccagctgatttctgcaagaagaaaaggtaatggcgcactttacctttccttgtgtttcctctgaagaatctgaaatctttaccatgactaaagggctgctactgcgaaggcttcttcgcatttatcatcagtaacaaggagaagttgagacaaaaacaaattagccgtgtaagacagactaagctgggttctagagatggctttagcagattagaacatgtgctgcagttccaggaccagagtttatgctgaatgctgggattaaagtcgtgtgctaccaccaccaccaccaccacctgactaaagttaaactttaaagacagactaaaccagtacatggcttaataaggatagtgaccaagtgtcatgggtgaaatcatgtctgtacagctgctacctagattgacagaggtacaggaagactgtgataccctcaaccagataaacaccacatcactttttgttttaaatgagtattcactctatatttgtgtatattgtatgtgtccacacacacatagagtctattatacacacacacacaccttgcctaatgagaatcactgctaagtatattaaatcaccttcctggctttgtggtgaagcttagttgttagatatacaagggatgaaggagagaaagtgatttgtgattaaaatttcactgtgaaagtcagctgaaatgacttcctgtttaaaactattacattcatccctcttaacacttatcacagtttctccaggcaacttgtttttttaatatgattaaataacaaagggagtttgtagaagactgaggtgggtggattttttcacaaggctatcacttaaaattaggaaaagggaagtaactcatagcaaatattttaaccccagcaattaaaggcagaagcgggtgaatctgagtttgatgcccatctagtctccagagcaagttccaggacaggcagggctatagagagaaaccctgtcttgttccagaccacctagggctatataaagagatcttgtctctaaacaaaaaccagaaaatgtagtaaggttgtggtactcattatcagtaataaactgaaacatttctcttgcttttgccctttgctttcacctcaaaggaagaggattgattttgtggatttagatcatcctctctaaacagttgctgtcccagcactgagaaatgctgctagggcatagagcaatggctcagcagtgaagagcactgttgctccagaggcctgtgggtgttcccacaccgcagcgaacaaccatctccagttccaggggagtctgatgccctcttctggctttcttgagcaatgcacacatgatgcagacacatacaggcaaaacacctatatacataaaaataaatgtccaaagagagaggggaggtaaggggattggggccggggggagatgctaccaaccaccaggattgagactataactccttgctagagatacttttgtttttcatttttttcgagattgggtttctgtgcagcctacgctgtcctggaacttgctttataggccaggctagctacaaacacagagatctgcttgcctctgtctcctgaggactgggaagggactgaaggcaggcaccaccgcatgtggcaagatgggtgatttctttgtttttcagatttattttgtgatagttatgatgaaccactattatgtgagtactagaaaccaaaaccatggcctcgaaaggcacagcattgctcctgtgaagctatctgacatatttgctaattttttgtacaattattttgaacatgaacattacattatcaaagctagctatgaggtgtacttaggcaaattgttgattattaatataagaaattattcccactatttttatgtgaaactggattccacatagcttgtttcatgaatatttttaaaagcaaacaattcaagtatattaaaaataacaagaatctgtaacacttaatacataaaatgaccactaagatttgttatatatttaaatagctccaatgtctcgggagaaagttttataactgttatcttttatacaaaagtagtttattaaatatggtaacatgaacatatctaacacgttaatgaaaaaattgtacatctgttatgtatgctatagtaaatatactaaaatttttttctctcaagtaataaaaaatcacttct

SEQ ID NO: 96 - DNA, 1931 bp, Mus musculus
cggacgcgtggggcagagacacgtttctgagacacccgactatgtgacactctgatttcacagccctgacttccccacctgtggaacatgtaggatcgtttgcctaagatgcgaccatgccatccaggcttctccacaccctggcaagtttacacagcatatcagcaaaggctcatcagtgccagagacttacttggcttacattaagaccacttaggaaatctgaaagtacaacatgccacaatggcctgacaatacagcaacatttacactcattctttccaagtataacagctgacagtttgaataagccagagatcctggaaatgagccggataacatcagacacaagcagactctttccgttaaatgctgtccattggttggacggcaaagaacactggccaagcatgcacccctttgggactcacaggagcatgacccacaaaccaaatctcttgtgttctaagtggtttataaaagcagtaaagaggcatcactcatctgtatcaaatgaagcacttgttcccaaacaagaccttccgcagatcaagaggccgctgaaagcatcccggacccggcagccatccaggaccaaccttccagatctgtctgtgaatgaggacctgatgcagtgcacagcatttgcaaccgcagatgagtatcacctgggaagtctgtctcaagagctggtctcctgtggctatgtggaagtgacaagcctgcctagagatgcagcaaatattttggtgatgggtgtggaaagttctgcaaaagaaggtgatcccggaacaatattcttgttcagggaaggagctgctgtgttctggaatgtaaaagaaaaaactatgaagcacgtgatgcaagttctagagagacacgaaacccagccctatgaagtggctctcgttcactgggagaacgaagaactcaactacataaagacagagggacaatcaaaactgcacagaggggaaatcaagctaaactctgagctggacttggatgacgccattctagagaaatttgcgttctccaacgctctctgcctgtcagtgaagctggctatttgggaagcaaccctggacaaatttattgagtctattcagtccattccagaggcattaaaagctgggaagaaagtcaaactgtctcataaagaagttatgcagaaaatgggtgagctctttgccctcaggcaccgaataaacctgagctcagatttcttgatcacccctgacttctactgggacagagcaaacctggaagagctttatgacaagacctgccagttccttagcatcacgcgaagagttaaggtcatgaatgaaaaactgcagcactgcatggaactaacagacctaatgcggaatcacctcaatgagaagcgagcactccgcttggagtggatgatcgtcatcctcatcaccattgaggtaatgtttgagctggggagagtcttcttctgaccttgtgatcatgaaagcaccacactggcaagagagaagtcaagttctgaaccagcaaagccagcgttcactactggtgactcttactctaccctctaagtcaaggggctgtcagtgcgcaggggacacacctagaacctcaggaagctgaagcaggcagatcctgatgtccagagcagccctggctacacagggaaacgcactcatctctgcactggaaaagcagaggcagactgcccagtttgaggccaacaataacacagcagaactttctcaaaataaaacacaaatgacataaaaaaaaaaaaaaaaaaaaaaaaaaaaaaaaaaaaaaaaaaaaaaaaaaaaaaaaaaaaaaaaaaaaaaaaaaaaaaaaaaaaaaaaaaaaaaaaaaaaaaaaaaaaaaaaaaaaaaaaaaaaaaaaaaaaaaaaaaaaaaaaaaaaaaaaaaaaaaaaaaaaaa

SEQ ID NO: 97 - DNA, 2365 bp, Mus musculus
atggatgcagagctggagtttgccattcagcccaacaccactggcaagcagctgtttgaccaggtggtgaaaactattggtttgagggaagtttggttctttggtctgcagtaccaggacacaaaagctttctctacttggctgaaactcaataagaaggtgactgcacaggatgtgcggaaggaaagtccattgctcttcaagttccgggccaagttctacccagaggatgtatctgaagaactgatccaggatatcacccagcgcctgttctttctgcaagtgaaggagggcattctcaatgacgacatttactgtccacctgaaactgcggtcctgttggcttcttatgccgtccagtctaagtatggtgacttcaataaggaagtgcacaagtctggctacctggctggagataagttgcttccccaaagagtcttggagcagcacaaactcaacaaggaccagtgggaagagaggatccaggtgtggcatgaggagcaccgtggcatgctcagggaggatgctgtcctggaatatctcaagattgctcaagacctggaaatgtatggtgtgaactatttcagcatcaagaacaagaaaggctcagagctatggctgggcgtggatgccttgggtctcaacatctatgagcagaatgacagactgactcctaagattggcttcccgtggagtgaaatcaggaatatctctttcaatgataagaaatttgtcatcaagcccattgacaaaaaggccccggactttgtgttctatgctccccggcttcggattaacaagcggatcttggccctgtgcatgggaaatcatgagctgtacatgcgtcggcgcaagcctgacaccattgaggtgcagcagatgaaggcccaggctcgggaagagaagcaccagaagcagatggagcgtgctctcctggaaaatgagaagaagaagcgtgacgtggctgagaaagagaaggagaagattgagcgggagaaggaagagctgatggagaagctgaagcagattgaggagcagactaagaaggctcagcaagagctggaagagcagacccgcagccccttagaacttgagcaggaacggaagcgtgcccagagtgaggccgaaaagctagccaaggagcgtcaagaagctgaagaagccaaagaggccctgctgcaggcttctcgggaccagaagaagacccaggaacagctggcttcagaaatggcagagctgacggcacggatctcccagttggaaatggctcgaaagaagaaggaaagtgaggctgtggaatggcagcaaaaggcccagatggtacaggaagacttggagaagactcgtgctgagctgaagactgccatgagtacacctcatgtggcagagcctgctgagaatgaacatgatgagcaggatgagaatggagcagaggccagtgccgagctgcgggctgatgctatggccaaggaccgcagtgaggaggaacgtaccactgaggcagagaagaatgagcgtgtgcagaagcatctgaaggcccttacttcagagctggccaatgcccgagatgagtccaagaagactgccaatgacatgatccatgctgagaacatgcgactgggacgagacaaatacaagaccctgcgccagatccggcagggcaacaccaaacaacgcattgatgagtttgagtccatgtagtgggcgtccagccttcaggggcccctcctccttcttccttgttccccacactcccatagttttgcctaactaacactgtgctggagccactaactagaaaagccttggagccatgccaaacgttcagtatagccatgggaccaaacttaatctccccactcataccctcgggcaaacaaatggcccactgtggtgccaatggaatctccttttccttctttgtcacactcattcaacctagctctctagaatagagcatttctcccgcccagctcagagacacgcattccttttggtttgacaagcaccccctccccatatacacttactgttgtcctctgggactcatgtgtgaagtaggttaacagctagctcccatcccttgccagtcctgtgatttgcaaagattggaatatttgtgttgtttagggacagaaggagggaattggctttatcatttagtagtcagatgacctaggatttagcctcttaattaagtctatcccttttacagttacttaggctttgtaccgattggaggataaaagagatgtttagccattcttatttcttctacctcccatattggacctattacaaatctagtcccagtgggccttgtctctgtgttagggatttagttctaatcaagatgggatgagag

SEQ ID NO: 98 - DNA, 2633 bp, Mus musculus
ggatccactctcagctcagcaacagaccagggcttactgtccctactgtgtgtcaagcactacatgagactttggcataaaccatctcaggaggttcatctcagggcacaaagggaagtggctggagaggatgaaggactttggacttgttggggagtggatggtggaagaaacgtttgcttagctttcaagcctccagagacccaaacctccattccagtgaatcaggatgacaacgaagctgtgtgccttggctgcccctcacacaatgtcttacactagatgatttgggccaaagtgcctgaagaagtggcttcccacacctttaccttacacaggcctgggacaggcagtcttgactgcccaacctgagttctgtactaactggggaggggacacagggccaggatctagataacaatcggatgccctgagcatgccagagcagacaaaggacagaccaaggctgtgatgggaatccaactgtggccctcaaccagtgtgtgtgtgtgtgtgtgtgtgtgtgtgtgtgtgtgtgtgtgtgtgtgtgttttctaaccccagaacttaaaaatatctggagatatctttgcagaactttaggggaccaggaccagcagtgctactgaaaatcttctaagattcatttcgataaggctgaggatgagagtccctggtgttcagcaagagagtccctgagagagtaaggagggctaaaattccaacctttctcccagaggacacttgcctaccctgatggtgtgccctttagtcatttagctgggggaggcatggttctgcactgagaagaaagcataccagatctcattccacaggctcctaggctctgatctgttggggggagggggagaatttaaagaaatatttagtctttagtaggtcaaaaggtcagacactgaatgtcatctctttgtaacacacaggtagcaggtgagaagggataaaggtcttcactgctactgttgccaatggcaacaaggatcagaagccacggaacacgcccaccccctcccccaccccctccccgacccaggtaaataggagctgaagctgtatagaagcttacagaaatgactggggagtctttccgtgcacaggtatggaaagggcccagaatatattaactgaaaaaaaaaaaaaccacaaacgtaaattccagaaaaggtctgtgctttcctttcctggaagaagacagaaccacacgatcccgcagaatagtgtcagtccacacgcgcaaaaagccttgggtctctgaccaccaccgtgcatgggttcacctggagcgctttctgtccagtgcatatttaataccaccaacttcgcatcatttcctgggagagctgtggtagttgctctgctcttcatccctagagttaaaacatcagcttcctaggaactggccaggccacggatgctgagctttagacaaaggcctgtaaatggcctcttccttgatgacgctagcaaacctgaaggagacgcgttttcaacactcaagaggcgtttgaagaactcccaggggggtaccggtgagaattccaggcgtttgaaggactctcaagggaagtaaggagggggtacacaaaaactaggaccaaaagcaacctttccccttccacacctcctctttctaggctaggaggggttgggtgaaaagagcaaatggaaggtctgaactgaaagtggccaacagcagggacaaacctggctctgcaccatcttcgcccccgcccctcccgccccctgccccgccccgccccgatccccccccgtgccgccctctcaccctgggaggagggatcgctacaatggaccctcctgcgggcttgtgcactcttggaatccagctgtcgcgccccgcggagccccgtgtcccccgagggcgcccatttccgggccgtccatcacccggagtgcattggcagcaaccgtccgggccgaacccacagcccgtcccgccttcttggtgtcaggcgatccccagtctgtcccaaaaatgcctgtggacttcaacgggtactggaagatgctgagcaatgagaatttcgaggagtacctgcgcgcgctcgacgtcaacgtggccttacgcaaaatcgccaacttgctgaagccagacaaagagatcgtgcaggatggcgaccacatgatcatccgcacgctgagcacttttcggaactatatcatggacttccaagttgggaaggagtttgaggaagatctgacaggcatagacgaccgcaagtgcatgaccactgtgagctgggatggtgacaaactccagtgtgtgcagaagggagagaaggagggacgtggctggacgcagtggatcgagggtgatgaacttcacctggaaatgagagctgagggtgtgatctgcaagcaagtgtttaagaaagtacactgagcagcccgaacagcccgaggagataaccttggtcttcaggaacaagtgggatgggcctgtggtcaggagccccctctgcctaacatggggaccgaaacgcatacccaccccaggcttctgccagcgaagtctctctctttgcctggtctcttttcctttacttaaaatgaagtgaccccaataaaagtgatctctgtttaaaaaaaaa

SEQ ID NO: 99 - DNA, 6652 bp, Mus musculus
atgatagaagacaaaggacctagagtgacagactacttcgttgtggcaggtctcactgatacatccactcttttggatcaagaaataaatcgtacagatactaactcgattggtcctaaagctccaatcacagacattgctgttattatcaaatcagctggggaaactgtacctgaaggctacacctgtgtggaagccactccatcagcactccaagcaaacttgaattatggaagtctgaagagcccagagcttttcctgtgctacaggagagggagagataagccgccccttacagatattggcgtgctatatgaagggaaagaaaggcttatgccaggatgtgaagtgatccaagccacgccgtacggccgctgtgccaatgtcaacaatagttcaactacttctcaaagaatctttatcacctatcgaagggctcccccagtgcggtcccagaattccttggccgtcactgatatctgtgttattataaccagtaaaggagaaacccctccgcatactttctgcaaagtggataaaaatttaaactgtggcatgtggggttccaacgtgtttctgtgttacaagaagtctgtgcctgcttcaaatgcaatagcatataaggctggtttgatttttcgatatccggaagaagactatgagtcttttccgctctcaccatctgtgcctctcttctgccttcctatgggagccactattgaatgctgggatcctcaaatcaaatacccacttcctgttttctcaacatttgtcctgacagggtcttcagctgaaaaggtatatggagctgccatccagttttatgaaccttactctcaagaacgtctaacagagaaacaacttacacagctgggcctattgaccctcgtggagaaaagagtggtctccaaacccatcaattcaaacaagtgcatttgtttgctttcacactggcctttttttgaagcttttaagaattttcttatgtttatctacaaagtttctgtgtctggaccacatcctcttcccattgaaaatggcgccaactttagctccttgctgatgaatctgggtcctgagaactgcgcgacattgctgctgctggttttgctcgagagtaagattctgctgcactctctgaggccagcggtactaactggggtagccgaagctgtcgttgctatgatctttccatttcagtggcagtgcccatatatccccctctgtcctctttcattggctggagtgcttagtgcgcctttaccatttatagttggagtggactcaaggtactttgatcttcatgacccaccacaagatgttgtctgcattgacttggatacgaacacattatatgtagctgatgaaagaaagaacataaactggaagcagcttcccaaaaggccgtgcaagagtctgcttggcaccctgaggaggctgtatcagcagctctgctcagttcaccgaaaacctcaagaaagttcagcaattgagatgactccaattgaagcagattactcttggcaaaaaaagatgacacaattggagatggaaattcaggagacatttttgcgatttatggcgtctattttaaaagggtacaggtcatatctcagaccaatcacagaagctccttctaataaagccacagctgcggattcattgtttgatcgacagggttttttgaaaagtcgggatcgtgcctatacaaaattctatactcttttatccaaaacacagatttttattcgtttcattgaagaatgcagttttgtaagtgataaagatactggattggcattttttgatgattgcatcgagaagttgtttccagataaaggtgtagagagaacagaaaaggttgacttggattcagcagaagacaccagattgatagagctagatgattcacagagaagtgaacacactgtatttataatgccacctgagccgcctcctgatgatggaaataacttatcacctcagtacagttacacatactttccaagattggatcttaagctttttgacagcccacagaagctgaaactgtgcttcaatagacatcctcctgggagtagcattacaaacagccctgccctcatggctaaaaggactaaacaggagataaaaacagctcataagttggcgaagagatgttatacgaatccaccacaatgggccaagtatctattcagccactgttacagtctgtggtttatttgtctcccagcctatgttagagtttctcaccctaaggtccgagcactccagcaggcacatgatgtgcttgttaagatgcggaagacagacgtggatccactagatgaggtgtgctatcgagtagtcatgcagctttgtggactttgggttaatcctgttttagcagtgagagtcttattcgagatgaaaactgctagaataaaaccaaatgctatcacttatggctattacaataaggtagttttggagagcccatggcccagcagtactcgcagtggtattttcttgtggacgaaagtacggaatgttgtacatggtttggcccagtttaggcaaccacttaaaaagactgggcaaaaatcacaggtcttttcaatatcagctcctcagaatgctgcatgtggaagtgatggggacacagtgagccatggtagtgtggatagttctaacgatgctaacaatggggagcacacagtcttcgtcagagacttaatcagccttgattccattgataatcactctagcacaggcggtcagtctgaccagggctacgggtctaaggatgagctggtaaaggagggtgcagatggtcacgcccctgaagagcacacgccaccagagctgacgaccacagagctgcacatcgaagaggagtgtgatatatctgccattgtctcaaaacacctgcagcctactcctgaacctcagagtcctacggagcctcctgcatggggcagcagtattgtgaaagttccatctgggttatttgataccaacaataggacaagtactggtagtacttcaactgtgctattttctactcaagctccagtcgaggatgcagtcttcagtgaggttactaatttcaagaagaatggtgatagaggagagaaaaaacagaagcatttccctgagaggagctgtagctttagttctgaaagtcgagcggggatgctgcttaagaagagcagtttggacctgaattcaagcgaaatggccatcatgatgggagcagatgccaagatcctcacagcagcactgacatgtcctaagacttccccgcctcatgtcacaagaactcacagctttgagaatgttaactgtcatctagctgacagtaggactcgcatgtcagaaggcacccgggattctgagcacagatcatctcctgtgctagagatgctggaggaaagccaggagctcctggagcctgtggttggtgataatgtggcagagactgcggcagagatgacgtgtaacagtctacaaagtaacagtcacagtgaccagtccagagacacacaagctggagcccaagatccagtgaacaagaggagcagttcatatgctactaggaaagccattgagagggaggatgtggagacgggactagatccgttgtctcttttagccactgaatgtgtagaaaaaacgtctgattctgaagataagttattttctccagtaatttcacgtaatctggctgatgaaattgaaagttacatgaacctaaaaagcccactaggcagtaaatcttgtagtatggaattgcatggagaggggaaccaggagcctggctctcctgctgtgtttgctcaccctttagaaaggagctcgagtctgccttcagaccgtggcccgccagcacgagacagcaccgagactgagaagagctcccctgctgtgtccagctctaaaactctgactgggcgtttcaagccacagagtccttaccgcgcttacaaagaccggtccacttccttatcagcattagtacgttcttcaccaaacagctctctgggttctgtagtcaattctctatcggggctaaagttggacaatatactctcagggcccaagatagatgtcctaaaatctagtatgaaacaagcagcaacggtggccagtaagatgtgggtggctgtagcatctgcctatagctactcagatgacgaggaggaaactaataaagattacagtttcccagctggcctagaagaccatcatatagtgggagagactctgtcgcctaacacaagtgtctcagggttggttcccagtgaactgacccagagcaacacaagcctcggcagtagtagcagcagtggagacgttggaaaactgcagtgtccagcaggtgaagttccattttcaagaaatatcaaagggcaggactttgaaaagtcagaccatggttcttctcagaataccagtatgtctagcatctatcaaaattgtgcgatggaggttttgatgtcgagttgctcacagtgcagagcttgtggcgctctggtttatgatgaggaaatcatggctggatggacagcagatgactcaaatttgaatacaacctgcccgttctgtaaaagcaacttcttgcctcttctcaatgtagaatttaaagacctgcgaggctctgccagctttttcttgaaaccaagcacgtctggtgacagtttacaaagcggcagcattccatcagccagtgagccctctgaacacaaacccacgtccagttcagcagaacctgacctgatcagctttatggatttctcaaaacacagtgagaccataacagaagaagcaagttatacagtcgaatcaagtgatgaaataaagaaaaccaatggtgatgtccagagtgtgaaaatgtcatctgtgcctaacagtttatctaagcgaaacgtatctttgactcgaagtcacagtgttggaggccctctgcagaatatcgacttctcccagcgaccatttcatggcgtctcaacagtcagtcttccaagcagtctgcaggaagatgtggaccatctaggcaagcgacccagtcctcctcctgtgtctgtgccctatttgagtcctctagtgcttcggaaggaacttgaatctttgctagaaaatgaaggtgatcaggtcatccatacatcctcattcatcaatcaacacccaatcattttctggaacctggtttggtatttcagacgtttggaccttcctagcaacttgccaggccttattctcacctctgagcattgtaatggaggtgtgcagcttcctctatcatctttgtcccaggacagcaaactggtgtatattcaactgctgtgggataatatcaaccttcatcaggaaccaggagaacctctgtatgtctcttggaggaacttgaattctgagaagaagccgtcacttctgtcagagcagcagcaggcagccagcgctttagtggagacgatcaggcagagcatccagcagaatgacgttctcaagcccatcaacctgctttcccagcaaatgaagccaggcacgaaacggcagaggagtttatacagagaaatccttttcttatcattagtgtctcttgggagagaaaacattgatattgaggcttttgacaatgaatatggactcgcatacagaagtctgccttcagagagtcttgaaaggttacagagaatcgatgccccacccagtatcagtgtggagtggtgcaggaagtgttttggagcgcctctcatttaaacgagattctttccaattttggttgagtactggggaaatggatcctgtctgaaaactttctgtgttcttccaaaatcctaacttggtgaaagctgaaatgaagtaactctggggatgaaatacaaatgaactgcaattcatacggaatcatctcagaatgtacaacagcactcagttcctggaggtttgttgatggtgaagactcctgacctatttcccagcctctgctgaaaatcaacacaactatttttgcatctcacacagtaaaagaaataatggaagttttcatctttctagaaaacttgcttttattgaagctgtccagctagggaatggcagattaaatttgcctaaccaaaagacatgaaatagttgaataataagactaactgtgtatgattgtatgtatgaggctatgtagtcagtgtgtgtataggtgtctatttattaacatgctgaggttgcatgttgcagcagttttctgaagtaggcctcattgcccagtcagtgactactatacttgtttgtagtcagcagttccaaaaacatctaagtctttcttaacaactgccttccctacaacttaaaatcttatatctttgccttttaaattatgtaatatcttgcttaataggttatatcttagatatccaggtgctccttccgtcttcttccaatactaagttcatctgcaatgctttcattggaatccagtaggtaaaatgaaattaatctttgtaacctaacaaacttatccagcacatgcttttaaaatactaatgaataaatagtctttgaccccgaaatctttattcaggcaggccacttgttggtattgattacttttttataatcctggtttcatgggaggcagaggcaggaggatctcaagttggaggcccgcctgaac

SEQ ID NO: 100 - DNA, 4210 bp, Mus musculus
atgttttcacttaaccacttcttgcctgactcctggttctcaatcacagaaaacagggtgtgtcaagatttggggccacacgcgccaagagcccggacactctggcgtagagagagcctagcctcctggggcagaacggggtggtcggcgattgggactgtcccacgagggggcgcgtctcgggctctaggacccgccctcgccgcgctgggcgcggggaggagacccgggaaccctggagcccggcgctccgcctcccgtttccggggcagcgcagttacctgcaccgccggagccacacctggcggaggcagaagtctcggggcgcgcggcggggctccgggcccccgatccgtgggcgccactccccgatcatgctgcctcggcggccgcctggacccaaagcggccagcccgagccgctgagccccgtggcggctgcgagctgcatgggggagcgcgggccaggctcgggaagatgccccggccggagttgcccctgccggagggctgggaggaggcgcgcgacttcgacggcaaggtctactacatagatcacaggaaccgcaccaccagctggatcgacccgcgggacaggtacaccaaaccactcaccttcgctgactgcatcagtgatgagttaccgctgggatgggaagaagcatacgacccacaggtcggagattacttcatagaccacaataccaaaaccactcagatcgaggatccaagggtgcaatggcggcgggaacaggagcacatgctgaaggattacctggtggtggctcaggaagctctgagtgcacaaaaggagatctaccaggtgaagcagcagcgcctggagctggcacagcaggagtatcagcagttgcatgccgtctgggagcataagctgggctcccaggttagcttggtctctggatcctcgtccagctccaagtatgaccccgagatcctgaaagctgaaattgccactgcaaagtcccgggtcaacaagctgaagagagagatggttcacctacagcatgagctgcagttcaaggagcgtggctttcagacgctgaagaaaattgatgagagaatgtcagacgcacagggtggctacaaactggatgaggcccaggctgtgctgagggaaaccaaagccatcaagaaagccatcacctgcggagaaaaggagaaacaagacctcattaagagtctcgccatgctgaaggatggcttccggacagacagagggtcacactccgacctatggtccagcagcagctctctggagagttcaagcttcccgatgccaaagcagttcctggacgtgagctcgcagacagacatctctgggagtttcagcaccagcagcaacaatcagttggccgagaaggtcagattgcgccttcggtatgaagaggcgaagagaaggatcgccaacctcaagatccagctggccaaacttgacagtgaggcctggcctggggtgctagactcagagagggaccgactgatcctcatcaatgagaaggaggaacttctgaaggaaatgcgcttcatcagcccccggaaatggacccagggagaggtggagcaactggagatggcccggaggcgacttgagaaggacttacaggcagcccgggacacccagagcaaggcgctgactgagaggctgaagttaaatagcaagaggaaccagctggtgcgagaactggaggaagccactcggcaggtggctaccctgcactcccagttgaaaagcctctcaagcagcatgcagtccctgtcttcaggcagtagccctgggtcactcacctccagccggggctccctggccgcctctagcctggactcctccacctcagccagcttcactgacctctattatgacccgttcgagcagttggactcggagctccagagcaaggtggagctgctgttcctggagggtgccacgggcttccggccctcaggctgcatcaccaccatccacgaggatgaggtggccaagacccagaaggcagagggaggcagccgcctgcaggccctgcgctccctatctggcactccaaggtccatgacctccctgtctccacgctcatctctctcctccccatcccctccctgttcccctctcatcactgatcccctcctgactggagatgccttcctggccccgctggagtttgaagacacagagctgagtaccactctctgtgagctgaacctcggcggtagcggcacccaggaaagataccggctggaggaaccaggacctgagggcaagccactgggccaagctgcaagtgtggccccaggatgtggcctcaaagtagcctgtgtgtccgctgcagtgtccgacgagtcagtagccggggacagtggcgtgtatgaggcttcagcacagagaccaggtacttctgaagctgccgcattcgacagtgatgaatcggaagctgtgggtgccactcgggttcagattgccctgaaatatgatgagaagaataagcaatttgcaatattaatcattcagctgagtcacctctctgctctgtcactacaacaagaccagaaagtgaacatccgtgtagccatcctgccttgctctgaaagcagcacctgcttgttcagaacccggcctctggactcggcaaataccctcgtgttcaatgaggcattctgggtgtccatctcctacccagcccttcaccaaaagaccttacgagtcgatgtctgcaccactgacaggagccatacagaggagtgtctgggaggtgcccagatcagcctggccgaggtctgccggtctggggagaggtcaacgcgctggtacaatctcctgagctacaaatacttgaagaagcagtgcagggagccccagccaacagaagctccagggccagaccatgtggacgctgtgtctgccttgctagaacagacagccgtggagctagagaagaggcaggagggaagaagcagctcccagacgctggagggcagctggacgtacgaggaagaggccagcgagaatgaggcagtcgctgaggaggaagaggagggagaggaagatgtcttcactgaaaaggtctctcccgaggcagaggagtgcccagcattaaaggtggacagagagaccaatactgacagcgtggccccatcccccacagtggtgcgccctaaggaccggagggtgggtgccccgtcgacagggccatttcttcgagggaataccatcatccgctccaagaccttctcgcctggaccccagagccagtatgtgtgtcggctaaaccgcagtgacagtgatagttctacgctgtccaagaagccaccttttgtgcgaaactccctggagcggcgcagcgtcaggatgaagcggccttcctccgtcaagtccctgcgcacagagcgtctgatccgcacctcgctggacctagaactcgacctgcaggccacgaggacctggcacagccagctgactcaggagatctcagtgctgaaggagctgaaggagcatttggagcaagccaagaaccacggggagaaggagctgccacagtggctgcgtgaagacgagcgcttccgcttgctactgaggatgctggagaagaaggtggatcgtggggagcacaagagtgagttgcaagccgacaagatgatgagagctgctgccaaggatgtgcacaggcttcgaggccagagctgtaaggagcccccagaagtgcagtctttcagggagaaaatggcatttttcacccggcctcggatgaacatcccagctctctctgcagatgacgtctaaccaccagaaaagtatttcctttgtctcgtgcgcgcgcgtgcagaccaagctgtgaaggctgactgtgactaatgttatttatgaggcattatatgaaggtactgagtcacaagtccccgagcgctcttgttggtttgaagacagattttttttttaaatttcaggttttcttgttattatttaaaaaaaaaaatgacaaagcaaccataacaacaaaaacaaaaaccaaacaaacaaaaaaaccagcattaaaatgacaagattgtatagtttgtatatttaggaatgtatttttgggaaagaatttaaatgaactaaagcagcattaagtggctgctagtcttaaaactgtctagagttttctttttgtacagcaacaactttcagaggtttccctgcaataataaaaaaaaaaaaa

SEQ ID NO: 101 - DNA, 2282 bp, Mus musculus
gatcctgggccctcccggaggccgtagcggcggcgcggcggcattgctggccaccacctcctccctagccgcagcccagctcaacccgcggcccgccgcgctgtcgctgcagtcatggctgctgacggggtggacgaacgttcgcctctgctgtcagcatcccattcgggaaatgtcactcccacagccccgccgtacttgcaggaaagcagccccagagctgaactcccacctccgtatacagccatcgccagtccaggaacaagtggtattcccgtgatcaactgtcgtgtgtgccaatctctaatcaacctggatggtaaacttcaccagcatgtggttaagtgcacagtttgcaatgaagctacgccaatcaaaacccccccaacagggaagaaatatgttagatgcccttgtaattgtctactcatttgtaaggatacatctcggcgaataggatgtccgagacccaactgtcgacgcataattaaccttggccccgtaatgctcatttctgaagagcaaccagcccaacctgcattgccgatccagccagaaggcacaagggtagtgtgcgggcactgcgggaacacattcctgtggatggaactgaggttcaacactctggcaaaatgcccacactgcaaaaaaatctcctcggtaggtagcgcccttccccggagacgctgctgtgcgtatgtcaccatcggaatgatatgtattttcattgcagttggattaactgttggcacacaagatttttcaaggcgatttcatgcaacctatgtgtcttgggcaattgcttatctgctaggtttgatttgccttatccgagcttgttactggggcgcaatcagagtcagttatccagagcacggctttgcttaagtctcctcatgaatccttgatgcaggcgagagtgtccagtagtccttgagaagctctgctggacgccttcaaatcatttatcctcctggattccatcctggtttgtatagtagtctcaagaatttgtgagtcttttctgaacagacgctcactgaagtacattatatgcaagttcattttgctgctaggttttcagacttggaaaaataaagctgtgtctctgttcttttaaatcataaaggtatttttgcatttgtcctcccacgttatatctaatatcagtctttcattatgtttaaaccagttgttccattacttgttgctgtgggactatccccaagaagtgtttataaatgtttctacaatagggtcacatttatacttacattttaaacagaattgcttgctttaaaaatctaagcaatatgcatttttgcttgaactgcttactgtaattttaacctaagagtatagataccttattcaggaaaaacaaattgagtgtactttgaaaaacttgacattcttgtcagagaatcatttctagatagtatatgcttgttttttttgttttttttttttttttgttattgtttgtagaaagatacaatattttggtagtaaattaaaatacctaggatgaacatatatatagtccacagttggagatgttagataaatgtcttttctctaagattacaggactttttgcctttcagtcttgtctttttatttagcatttacaaaaatctggtctggatttatggaatttaatgttactctgctgaatgtattcctttataaactggaggaagtatttcagacaacatgttttataatacttcatcatctcgtcaaagacatgttgacactgggttgcagtccttttcattcaatcatggtaaacttatcttcttgacatctgtgtacacccgcttctctgggaagagaacttaggacttttttgctttagctgaaagttagaattagagattctcttaccatttctcacctggtcagataatgactcgacttcttcaagagaacggatcagagagagagagtttcatcgtcacctaaaacttcgcgtggaattcatggactcagctcttgcactgcccagttttgcagtttagaaggaattccttgagagtcagtggtctaaactctttcacattgtagaattagacaatgagatgccctgaatacattagtaggtgattccaagggacaagactaatgttctaaattatttatgttcctgattaatatgaaaatgtacttaatgcaaagtcggagtcagctacacctcaaagagaaaatgataaatgtataaatgaagtagctcaggattctatgtacctttgaaaatatgctaataaagattattatcc

SEQ ID NO: 102 - DNA, 2423 bp, Mus musculus
attgccttctccgggtggagaccagaccgctgcgtccgtccctgctgtctcacgttccgcagctctgcagctccgcaatcctacaccatgtcggacagtcgggacccagccagcgaccagatgaagcagtggaaggagcagcgggcctcgcagagacctgatgtcctgaccaccggaggcgggaacccaataggagataaacttaatatcatgaccgcggggtcccgagggcccctcctcgttcaggatgtggttttcactgacgagatggcacactttgacagagagcggattcctgagagagtggtacacgcaaaaggagcaggtgcttttggatactttgaggtcacccacgatatcaccagatactccaagggaaaggtgtttgagcatattggaaagaggacccctattgccgttcggttctccacagtcgctggagagtcaggctcagctgacacagttcgtgaccctcgggggtttgcagtgaaattttacactgaagatggtaactgggatcttgtgggaaacaacacccctattttcttcatcagggatgccatattgtttccatcctttatccatagccagaagagaaacccacagactcacctgaaggatcctgacatggtctgggacttctggagtcttcgtcccgagtctctccatcaggtttctttcttgttcagtgaccgagggattcccgatggtcaccggcacatgaatggctatggatcacacaccttcaagttggttaatgcagatggagaggcagtctattgcaagttccattacaagaccgaccagggcatcaaaaacttgcctgttggagaggcaggaaggcttgctcaggaagatccggattatggcctccgagatcttttcaatgccatcgccaatggcaattacccgtcctggacgttttacatccaggtcatgacttttaaggaggcagaaactttcccatttaatccatttgatctgaccaaggtttggcctcacaaggactaccctcttataccagttggcaaagtggttttaaacaaaaatccagttaattactttgctgaagttgaacagatggcttttgacccaagcaatatgccccctggcatcgagcccagccctgacaaaaagcttcagggccgcctttttgcctacccggacactcaccgccaccgcctgggacccaactatctgcagatacctgtgaactgtccctaccgcgctcgagtggccaactaccagcgtgatggccccatgtgcatgcatgacaaccagggtggtgcccccaactattaccccaacagcttcagcgcaccagagcagcagcgctcagccctggagcacagcgtccagtgcgctgtagatgtgaaacgcttcaacagtgctaatgaagacaatgtcactcaggtgcggacattctacacaaaggtgttgaatgaggaggagaggaaacgcctgtgtgagaacattgccggccacctgaaggacgctcagcttttcattcagaagaaagcggtcaagaatttcactgacgtccaccctgactatggggcccgcatccaggctcttctggacaagtacaacgctgagaagcctaagaacgcaattcacacctacacgcaggccggctctcacatggctgcgaagggaaaagctaacctgtaactccggtgctcagcctccgctgaggagacctctcgtgaagccgagcctgaggatcacctgtaatcaacgctggatggattctcccccgccggagcgcagactcacgctgatgactttaaaacgataatccgggcttctagagtgaatgataaccatgcttttgatgccgtttcctgaagggaaatgaaaggttagggcttagcaatcatttaacagaaacatggatctaataggacttctgtttggattattcatttaaatgactacatttaaaatgattacaagaaaggtgttctagccagaaacatgacttgattagacaagataaaaatcttggcgagaatagtgtattctcctattacctcatggtctggtatatatacaatacaacacacataccacacacacacacacatgcaatacacacactacacacacatacacacactcacacacactcatacacacacatgaagagatgataaagatggcccactcagaattttttttttatttttctaaggtccttataagcaaaaccatacttgcatcatgtcttccaaaagtaactttagcactgttgaaacttaatgtttattcctgtgctgtgcggtgctgtgctgtgctgtgctgtgcagctaatcagattcttgttttttcccacttggattatgttgatgctaatacgcagtgatttcacataggatgatttgtacttgcttacatttttacaataaaatgatctacatgga

SEQ ID NO: 103 - DNA, 1201 bp, Mus musculus
ccactgcccggcgcagtccttcgctgcgcgctgaccccgaggaaggcagtacttggtcagggcgctgagggaccctccaccgggacgccggcccctccccgggcctctgctcacttgacccccactccctagtccgtccccttagtaggcctgtcggatcggggacgtggggcgagctgagagcaggcccggggtgggtggtcaccgtggtgaagacgtggctgtcaagatgatagaagtactgacaactgactctcagaaactgctacaccagctgaacaccctgttggaacaggagtctagatgtcagccaaaggtctgcggcttgaaactaattgagtcggcccatgataatggcctcagaatgactgcaagattacgggactttgaagtaaaagatctacttagtctaactcagttctttggctttgacacggagacattttccctagctgtgaatttactggacagattcttgtctaaaatgaaggtacaggcgaagcatcttgggtgtgttggactgagctgcttttatttggctgtgaaagcgactgaagaggaaaggaatgtcccactggcgactgatttgatccgaataagtcagtataggttcacggtttcagacctgatgagaatggagaagattgtgttggagaaagtgtgttggaaagtcaaagctactactgcctttcaatttctgcagctctattattcactcgttcacgacaccttgccatttgagaggagaaacgatctgaattttgaaagactagaagcccaacttaaggcctgccactgcaggatcatattttctaaggcaaagccttctgtgctggcgctatctatccttgcgttggagatccaagcactgaaatacgtagagttaacagaaggagtagaatgtattcagaaacattccaagataagtggccgagatttgaccttctggcaagagcttgtttccaagtgtttaactgaatattcatcaaacaagtgctccaaacctaacggtcagaagttgaaatggattgtgtctggacgcactgcacggcaactgaagcacagttattatagaataactcacctcccaacgattcctgagaccatttgttagttgataaatctggttgttattctctgtatacagaaaattttccagtatgatcattttctgctacaactgaagaattgaaatactatc

SEQ ID NO: 104 - DNA, 649 bp, Mus musculus
gaggaaaaggaaacttctgagaaaccgaaactgccgcagaaagggcagacccgcagcgcgctccatcctttgcccttcagtgctgcctttgctccgcaccatgaaccacacttctcaagccttcatcaccgctgccagtggaggacagcccccaaactacgaaagaatcaaggaagaatatgaggtggctgagatgggggcaccgcacggatcggcttctgtcagaactactgtgatcaacatgcccagagaggtgtcggtgcctgaccatgtggtctggtccctgttcaatacactcttcatgaacttctgctgcctgggcttcatagcctatgcctactccgtgaagtctagggatcggaagatggtgggtgatgtgactggagcccaggcctacgcctccactgctaagtgcctgaacatcagcaccttggtcctcagcatcctgatggttgttatcaccattgttagtgtcatcatcattgttcttaacgctcaaaaccttcacacttaatagaggattccgacttccggtcctgaagtgcttcaccctccgcagctgcgtccctccttgcccctccctacacgcaggtgtaacactcatttatctatccacagtggattcaataaagtgcacttgataaccacc

SEQ ID NO: 105 - DNA, 2203 bp, Mus musculus
ccggcctcctccgcccggttgtgactgctgagggatggcggcggcgacaccgacagagacaccggctccggaaggcagtggcttgggtatggacgcgcgactggaccaggagaccgcgcagtggctgcgttgggaccagaaccctttaacctctgagtcagtgaaacagctcattgctggaggtaataaagaagagctgcggaaatgctttggggcccggatggagtttgggacagctggccttcgagcgcctatgggagcagggatttctcgaatgaatgacctgaccatcatccagaccacacagggattttgcaggtacctggaaaagcagttcagtgacctgaagcagaggggcgtggtgatcagcttcgatgcgagagctcaccccgccagcgggggcagcagccggaggtttgcccggctggctgcgactgcatttatcacccagggtgttcctgtatacctcttctctgatataacccccaccccctttgtgccgtacaccgtgtcgcacctgaaactctgcgcaggcatcatgatcactgcctcgcacaatccaaagcaggacaatggctataaggtctactgggacaacggagctcagatcatctctccccacgatcgcggcatttctcaggccattgaggaaaatctagagccctggcctcaggcttgggaggagtctttggttgacagtagtccccttcttcacaaccccagcgcgtccatcggtaatgactactttgaagaccttaaaaaatactgttttcacaggacagtgaacaaggagagcaaggtgaagttcgtgcacacctctgtccatggtgtgggccatgagtttgtgcagttggccttcaaggcttttgaccttgctcctcccgaagctgttccccaacagaaagatccggatcccgagtttccaactgtcaaatacccgaatcctgaggagggcaaaggtgtcttgactttatcttttgccttggctgacaaaatcaaggccaaaatcgtcctagccaatgacccagatgctgacaggctcgctgtggctgagaagcaagacagtggtgagtggagagtgttctcaggcaatgagctgggggccctgctgggatggtggctcttcacttcctggaaagaaaagaaccaagatcaaagtaacctcaaagacacatacatgctgtccagcactgtttcctccaaaatcttgcgggccatagccctgaaggaaggctttcatttcgaggaaacattaaccggcttcaagtggatgggaaacagagcccaacagctcggagaccaggggaaaacagtcctatttgcatttgaagaagctatcggatacatgtgctgtccctttgttctggacaaagatggcgtcagtgctgctgttatttgtgcagagctggcgagctttctagcaacgaagaatttgtctttatctcagcagctaaatgccatctatgtggagtacggctatcatattaccacagcttcatattttatctgccatgatcagggcacaattcaaaacttatttggaaacctgagaaactatgacgggaagaataattatcccaaaatgtgtggcaagtttgaaatctctgctatcagggaccttacaactggctatgatgatagccagcctgacaagaaagctgttcttcctaccagtaagagcagccaaatgatcaccttcacctttgctaatggaggtgtggccaccatgcggaccagtgggactgagcccaaaatcaagtactacgcagagttgtgtgctccccctggcaacagtgatccggagcatctgaaaaaggaactggatgagttagtcggtgccattgaagaacattttttccagccacaaaaatataacctacagccaaaagcagaataaaacattccagtactggataggattaaatttacctccaataaactgaacttgattgttaaagcaataatattttagggccaagtgattcagataatcaccacaagtatttacatattttcaacagctctatcttccttgtgattttttttttaattattattatttttagcctgaaaagtgaataaaaaagcttggccaaacccaacaaactaacatctctatgaaaatgttaaatctgggcattatctgaattttttaaataaagatttaattttctaaaaaaaaaaaaaaaaaaaaaaaaaaaaa

SEQ ID NO: 106 - DNA, 3277 bp, Mus musculus
cacagacccaggagaaactgcagacaaatggagatacaaacggtcccaaggacagcagcgttcacctcctcccactggaccagaaggtaaaagacacagccagcaaaaggaatcggcccaggctgggctccctggggctgctttgcagacagacaaggagacagagagcaggaaggaaccgatctcacctaggaaactgtcctggggaccaaccttcacgtttctctggaaagcctctgcaagcatctccatgaaccactgttggataatacaatgatgtggaaaatgggaccccacttcaccacgctcttggccatgtggctggtgtgtggctcagcatctcattctcctgccttggatagcgacagccacactggacggaaagtacctttggtttctccaatcagcagtaggtcagctcggtatctgaggcacaccgggaggtctggtggagttgagaaatccacccaggaagaaccaaatcctcagcctttccaaaggaggaagagtgtaccagtgttgagattagctcacccgaccatgagaccacccccctcaggtatcaatggagttccagtcagacctgaggtgagacccatagctaggagctcggcgcgtgagatggtccgagatgaggggtcttctgctcggacaagaatgttgcgattcccctctggatctagctctcccaatatcctggccagctttgcaggaaagaacagggtatgggtcatctcagcccctcacgcctcagagggctactaccgcctcatgatgagcctcctgaaggacgacgtgtattgtgagctggcagaaaggcacatccaacagattgtgctcttccaccaggcaggcgaggaagggggcaaggtacggaggatcaccaatgaagggcagatcctggagcagcctctggaccccaatctcatcccaaagctgatgagcttcttgaaactggagaagggcaagtttagcatggtgctgttaaaaaagactctgcaggtggaggagcgctacccttacccggtcaggctggaagccatgtatgaggtcattgatcaaggtcccatccgcaggatcgagaaaatcaggcagaagggttttgtccaaaagtgtaaggcctcgggcatagagggccatgtagtccaggaaggaaacgagggcggtggaggagcaggaggtacaggcctgggcggtgataagaggaaagaggacccaaggagaacacaagtccaccccaccagagaggctccgagaaagcaggccaccagcaaggcagccactcctcagcctcccccaactccaagggccaccacccttcctcctgctccagtcacgacagccactcgggccacatcccgggtagtgacaatagccgcaagacctacaaccaccactgcctatccagctacccagaggccctggacatcccggttgcatcccttctcagtctcccacaggccccctgcaacagcagaggtgaccactgccaggggcccctccgtctcagagcagctataccctctacctcggaaggagcaacagagagagaagccacaggccaccaggaggcccagcaaagccaccaactatggaagcttcacagccaccccacctcccaccctctgggaggtcagcgcaagagttgtgggcacaagccgtttccgggacaaccggacagacaaacgggaacatggccatcaggacccaaatgcggtgccaggtcctcacaagccagtaaaggggaagctgcccaaaaagaaggacagaattctcagcaacgaatatgaagacaagtatgacctcagccagcccacctcctctcagggggaggaggagcggcgggtggatagcgttccctcgcagaatgccaaggagtcgaaaaagcttgaaaagctcgagaaacctgagaaggagaagaagaaaaaagggaagagtgcaaaacaagacaagttactcaagagtgaaaagcaagcgaagaaagctgagaaaaagaccaaacaggagaaagacaagaataagaagaaaaaggcgggtaagacagagcaggatgacaatcagaagcccaccgcaaaacatctcgctccaagtcccaagaagtcagtggccgacctgttggggtctttcgaaggcaaacgaagactcctcctgatcaccactcccaaggctgagaacaatatgtatgtgcagcagcgggatgaatatctggagagcttctgcaagatggccaccaggaggatctctgtggtcaccatctttggtcctgtcaacaacagctccatgaaaattgatcacttccagctagataatgagaaacccatgcgtgtggtggatgatgatgacttggtggaccaacatctcatcagcgagctgaggaaggagtatggaatgacctacgatgacttcttcatggtgctgacagacgtggatctgagagtcaagcaatactacgaagtgccaatagcaatgaagtccgtgtttgatcttattgacactttccaatcccgaatcaaagatatggagaagcagaagaaggagggcattgcctgcaaggaggacaagaggcagtccctggagaacttcctatccaggttccgatggaggaggaggttgctggtgatctctgctcctaatgatgaagactgggcctattcacaacagctctctgccctcaacggtcaggcatgcaattttggtctgcgacatataaccattctgaagcttttgggtgttggagaggaagttggaggagttttagaactgttcccaattaatgggagctccatcgttgagcgggaagatgtgccagcccacttggtcaaagatatccgcaactattttcaagtgagcccagagtacttctccatgcttctagttggaaaagatggcaatgttaaatcttggtatccttctcctatgtggtcgatggtcatcgtgtatgacttaattgattccatgcaacttcggagacaggaaatggccattcagcagtctctggggatgcgctgcccagaagatgagtatgcaggatatggttaccatagttatcaccaaggataccaggatggctaccaggatgactaccgtcatcatgaaagttaccaccatggatacccttactgaacagaaatatgtaaccttattcccatccagtttccccttcatctgctaaagctgtgtgctggcagcttcataagggaatttctccatactctacataccccgactttttctttcagtgttcttccaagattaaagaaatagtaaactttcccct

SEQ ID NO: 107 - DNA, 1811 bp, Mus musculus
gagaagtttctaggctcgcgagtccccgagctttattaaactcctggctgtgctcaagacctcagcaggctttggctgggagccggggcagcctgggaggaaggcagccggtggcttactgatagccaagcgagagagagaggccctctgggattctgctgggcccgcttagggagggggtcacctttgtaagccaggaccccagctcaattctgggcagccagcggatggttgggctcgtggctgaaggaagatcagcattttctgaagtggagaactaaattctgaaagccatctcaagccacatcaccttgctgtgtgacctttgggtaggtggctctgtctctctgagcctctgtttccccctctaagttcgaccaacatcatggctgacgggcaattgcctttcccgtgctcctacccaagccgcctgcgccgagacccctttcgggactcaccgctctcctcccgccttctggacgatggctttggcatggacccttttccagacgacttgacagccccttggccagagtgggctttgcctcggctctcctctgcctggcctggaaccctaaggtctggcatggtaccccgagggcctccagccacagctaggtttggagtgcccgctgagggcaggagtcccccacccttccctggggagccttggaaagtgtgtgtcaacgtgcacagcttcaagccggaagagctgatggtaaagaccaaggatggatacgtggaagtttcaggcaaacatgaagagaagcagcaggaaggtgggattgtctccaagaacttcaccaagaaaatacagctccctgcagaagtggatccagccactgtatttgcctcgctttctccagagggcctgctcatcatcgaggctccccaggtccctccgtactcaccctttggagagagcagcttcaacaacgagcttcctcaagacaaccaggaagtcacctgttcctaagacgtcagccttggtccttcttcgctcccatccccagccccagggactctctgatttgagggtacactactttagcagcactcagatttaaggcaactcagatgttgggggatgggagggagaaccgaacgaccgtccctggatgatgtagtaatagatttctccacagggtgacgcaatgggtcagccttgcttggttgcgttaggtcaaaggattgggaggtttttcttcatcttatctgggtgaagacgtctcgcagtctacagttgcaaaacaagcaaatggggactgaagatttcatgttaaatttttaccttgcagttaatgcaagagttgcttttctctggggaccttcccatcacccagatccctgctctggaccctccttctacgtggcttggttgatgggactcattggctcacctcagtgtgtttctaaactctttgtctagaagaggttatgggcaggtcttatatccccatatgggatttatccttcaccacacaacacagtgcctttttttgcagcatgaccccatggctctcaaaccatcaccaccaagaactctgggagcccctcagttaattctctggctaaggtccccctttattgtgtcccctgtgtccaagtcacatttttacagagagctgtcttggagcagctccgcaaggaaccaagcaaaggccagacagcctgcacgcaggctagtggcattgtgtgtgtgtttgaggggtggggaggatgtgtgtgtctttgttgtgtgaattgtgctgttgtttagagggaaaataacggtgaataataatgatgataataaaggagctgatgttcct

SEQ ID NO: 108 - DNA, 3480 bp, Mus musculus
gccagaagagatgagtactaattccactcaggcctagaattgcctattgagatagacctgagcaggcgacatacgaatggcccaaggaagccaccaaattgattttcaggttttacatgacctgcgacaaaaattcccagaagtgcctgaagttgttgtatccaggtgcatgttacagaacaataataacctggatgcctgctgcgctgttctctctcaggagagtacaaggtatctttatggtgaaggagacctgaatttttcagatgagtctggaatttctggtctacgcaatcacatgacttctctcaacttggacttgcagtcacagaatgtttaccaccatggaagagaaggaagtcgagtgaatggaagcaggactttaacacacagcgttagtgatggacagcttcacggtgggcagtccaataacgaactgtttcagcaagagccacagacagcaccagctcaagttcctcaaggctttaatgtttttggaatgcccagtacatctggtgcttcaaactcaacaccgcatcttggatttcacctaggcagcaaagggacatcaaacctttctcaacagactcccaggttcaatcctattatggtaactttagccccaaacatacagactggccgtagtactcctacatctttgcacatacatggtgtacctccgcctgtactgaacagtccacagggaaattctatctatattaggccttatattacaactcctagtggtacagctcggcagacacaacaacattctggctgggtgtctcagtttaatcccatgaaccctcagcaagcctatcaaccttcacagcctggaccttggactacttatcctgcatccaatcctttgccacatacctcaacccagcagccgaatcagcagggccatcagacctctcatgtctacatgcctatcagttcgccaactactccacaaccgccaaccattcactcatctgggagctctcagtcttctgcccatagccaatataacattcagaatatttcaacaggacctcgaaagaaccagatagaaatcaaacttgaacccccacaaagaaacagttcttcaaaattacgttcttctggacctcgaactgccagcacttcctcattggtcaacagccagaccttaaatagaaatcagcccactgtttacatagctgccagtcctccaaatactgatgagatgatctcccgtagtcaacccaaggtctatatttcagccaatgccaccgcaggagatgagcaaggcatgcggaatcaaccgacactcttcatatctacaaactctgggccatctgcagcctccaggaacatgtctgggcaagtgagcatgggtcctgcctttatccatcaccatccacccaaaagccgagtgttaggtggtaactctgcaacgtctcctcgagtggtggtcactcaacccaacacaaaatatactttcaaaattacagtttcccccaataagccccctgctgtttccccgggggtggtctccccaacctttgaacttacaaatcttctaaatcatcctgaccattatgtagaaacagagaacattcagcatctcacagacccggctctagcacatgtggatagaataagcgaagcccggaaactgagtatgggatctgatgatgctgcctacacacaagctctgctggtgcaccagaaggccaggatggaacggcttcaaagagagctcgagatgcaaaagaaaaagctggataaactcaaatctgaggtcaatgagatggaaaataatctaactcgaaggcgcctgaagagatcaaattccatttcccagataccgtcactcgaagaaatgcagcagttgagaagttgtaatagacaactccagattgacattgactgcttaaccaaagaaattgatctttttcaagcccgaggaccacattttaaccccagcgctattcataacttttatgacaatattggatttgtaggccctgtgccaccaaaacccaaagatcaaaggtccaccatcaaagcaccaaagacccaagacgcagaggatgaggaaggtgctcagtggaattgcactgcctgtacgtttctgaatcatccggccttaatccgctgtgaacagtgtgagatgcctcggcatttctgagccaaaggccccgccttcctctgaaaccacatctaaagttcaagaaggtcgcctgtcatcgggaaagtgtttcaccgccacaggagttagtccagttgaaggtgtgacgagacagtggtgtgctgtgttgagtgtcagcccacagagctaatgatacctcaatctaatgtcatgggcagtgagattcatcacctgaaaggcctgagagaccgggctgcctgctgcctgaccatgtccagtgtcacgtgtcagtgcctaggtgttcccaggactcctcccctcttgtcaccactgatcctgatgggaggaagggagagacaggatgattgctttttgtgttgttagagcttttggtgaaacactacatacacaaagagaaggaacaaggtttgactgagaactctgctgccacatagtgccagtagatgtgggaaacgccacaaatctggggtacttttggccctgtcctctgtcttctgaggacgtctctgtgaagccagcatttaggtgtgagataaaaggaaagctgtgtctgtctgtacatccacagtgcgctccccaagcctctcctactgtacagatgtctcacgtctgctttgatttctccattatcttcttatatttctatatgtatagtgtaatagacttgtgttaactagtgtccttttcccttttagtaagcacgatcatgctccttttaagccttacctgagaaaagcaatgccataaggtagaaagcattaatgaaatgaaactgtgcacaacataactccctctccccttcctcctcctgtcctttgtcccttggtgccaatgctctgagaagacatgcaggtgctgcatgtgagtcactgcaagaaacactgcagccatcggacggtcgaggtcacgctgtacactgacttgagcagtgggtgaccaaacatgtcgttttgtcttctccagcagcttaaagcagaaagtatttaaacccactgccatcttgccccatctgtgtggtatcccatagaactccatgggaggctcttgttgggaaaatgcagttttaagaagcagcctcagcagccgttcccgcagcctcttcttcccgggaagaagtgtggctgtcggactgttggcacagtcatgtgtatttataaaacatagtcatctttaggacaactgaagaaaagctggaaaaaagaaagaaaacaagcagacttgaacactgaagcaacctcagacatctctttattttgatgatatatttttgtaaggaaaataaatattcatatgatcaggaatgtatataactaaaaaaaaaaaaaaaaaaaaaaaaaaaa

SEQ ID NO: 109 - DNA, 3739 bp, Mus musculus
ggtcgggccgcctctgccgctgtctccactgcagcacggggccgggtgtgcgggtgggagaaggtgagggagccgccagtggtccccgggaggctcgagatagatcatggaagggaagtggttactgtgtttgctgctggtccttggaactgcagctgttgaggctcatgatggacatgatgatgacgcgattgatattgaagatgatcttgatgatgttattgaagaggtagaagattcaaaatctaaatcagatgccagcactcctccatctccaaaggtcacctacaaagctccagttccaacaggggaggtttattttgctgactcctttgacagagggtctctgtcagggtggattttatctaaagccaaaaaagatgacactgatgatgaaattgccaaatatgatggaaagtgggaagtagatgagatgaaggaaacaaagcttccaggggataaaggacttgtactgatgtctcgggccaagcatcatgccatctctgctaaactgaataagcccttcctgtttgataccaagcctctcattgttcagtatgaggttaattttcagaatggaatagaatgtggtggtgcctatgtgaagctgctttccaagacggcagagctcagcctggatcaattccacgacaagactccctatactattatgtttggtccagataagtgtggagaggactacaaactgcatttcatctttcgacacaaaaatcccaagacaggtgtatatgaagaaaaacatgctaagaggccagatgcagatctgaagacctatttcactgacaagaaaacgcatctttatacattaatcttgaatccagacaatagttttgaaatattagttgaccagtctgttgtgaacagtggaaatctgctaaatgacatgactcctcctgtaaacccttcacgtgaaattgaagacccagaagaccggaagcctgaagattgggatgaaaggcccaaaatagcagatccagatgctgtcaagccagatgactgggatgaagacgccccttctaagatcccagatgaagaggccaccaagcctgaaggctggctagacgacgaacctgagtatattccagaccctgatgcagagaagccagaggattgggatgaggatatggacggagaatgggaggctcctcagattgccaaccccaagtgtgagtcagcccctgggtgtggtgtctggcagcgacctatgattgacaaccccaattataagggcaaatggaagcctccaatgattgacaaccctaactaccagggaatctggaaaccaaggaaaataccaaatccagatttctttgaagacctagaaccttttaagatgactcctttcagtgctattggtttggagctctggtccatgacatccgacatcttttttgacaactttatcattagtggtgaccgaagagtagttgatgattgggccaatgatgggtggggcctgaagaaagctgctgatggggctgctgagccaggtgtagtgctgcagatgctggaggcagctgaagagcgtccatggctttgggtggtctacattttgactgtagctttgccagtgttccttgtgatcctcttctgctgttctggaaagaaacagtccaatgctatggagtacaagaagacggatgctccccagccagatgtgaaggatgaagaagggaaggaagaagagaagaacaagagggatgaagaggaagaagaggagaagcttgaagagaaacagaagagtgatgctgaagaagatggtgttactggcagtcaagatgaggaagatagcaagcctaaagcagaggaggatgaaattttgaacagatcgccaagaaacagaaagccacgaagagagtgaaacaatctttaagaacttgatctgtgatttcctctccctccccttcccctgcaaatgtggtcctaggagagggcctggtgtaccttaggtgggagctcaaaacctcaagatgtcaccatcaacaggttccagtgaatactagcctgtaattttaaacatctagcagtaaataattgcagttgtaatgtaaaggaccctgtttctgtagaaaggaaaacatttaacataatggttgtgaaatgtaacatgaagcaactaactagtgttttgttgtttttaaaattttccaggtttgtctttttttttttccttttccttttttttttttttttagatacaatgatagaatttttgccagtttaaaatcttggcttaatttaatatattcatttgttcatgcagaaataacaccaacattaggaatgctagggagaatgaattgccgtttttataataacttttttaagtttggtattaaagcattcatgtgtctgtcctaaaattgtaatcacgttcaagtgcagttatttgtggttataaatcttgttttgtgtgcttccattagttaattcctcttaaagacacaagagcgattggatggaagcccaaatttatatcaaagttccctttacattgtattgaatagacccaaaaagaactaaaaggagactttgacttggtcatttcacatcagatcataaagtgcagtgttctgttgccctagagactgctccattcacaagcacctttgaagagggaaggagctggcttcatgtagcagttcatactgtacttcccacataggaggtctgacagctcgggtcctctggagcacaaggctttttaaggaatgctggtggtgcctgggtagataattacatcacttgttccactgtgttgacactgttttcctcatggatctcctccattcctagctttctctgctatgcattttcttcacagcgcagcttgcggtccgttgctgaaaattataagctctgcatagtgttggctttactgtgatgacatgtttcttcttttttagctggcccacacctttctagggtccaactacaggatagattacagactttccattagtgtctatttcttttactctgtgtagactttagaaagtctaatcaatccagagatgggccaattcagaattgactataattgaacacctgctaaaagtatttatgggaggattgacacacagcatgagttatttgacttttgtaggatatttaaaatcttcatttgcagttcatgtaacagttgtgtcttaaaattcacataataaagcagtcctgttcaaaaaaaaaaaattttttttttgtggcttgtagaattttttaaaagtgtatttagggctttttgttttttgtttgtttttttgttttgtttttcatgtggaatgcagatgggtgctagaggagcctctcccacatcactatagtgtaatattattacaccacactgaaatgtattcagaaacagatgtttcaatttcattctttctccagaggtggtccagttgtaccaatgatactattccttgcactgaatatatataaacactcttcagtgtttatattggggaaatactgggaaagaaatatatttgttaaggatgaaggctgtatctgttgtctttataaacactggttcatttcttttgagggtggaatgcatttttcttcctgttcagtgctttatcaccatctgttgtttgtggtcacagtgaccatagctatgtagcggacgtttccaaatgtatagagtgaaataaacagttactagcaagaaatgaaaaaaaaaaaaaaaaaaaaaaaaaaaaaaaaaaaaaaaaaa

SEQ ID NO: 110 - DNA, 1187 bp, Mus musculus
gaacaaccggtggcagagtccgttgggtgatggcctctaattttaagaagacaaccatggcatccagtgcccagagaaaaaggatgagtcctaagcctgaacttactgaagaccagaaacaggaaatccgggaagcttttgatctctttgatgctgatggaactggaactatagacatcaaagaactgaaggtggcaatgagggccctgggctttgagcccaagaaagaagaaattaagaaaatgataagtgaaattgataaagaaggaacaggaaaaatgaacttcagtgactttttgacagtgatgactcagaaaatgtctgagaaagacactaaagaagaaatcctgaaagctttcaagttgttcgatgatgatgagactgggaaaatatcattcaagaatcttaagcgcgtggccaaggagctgggtgagaacctgacagatgaggaactgcaggaaatgattgatgaagctgatcgagatggagatggtgaggtcaatgagcaagagttcctgcgcatcatgaaaaagaccagcctctattaagatcagtgtttctttttctactgcaagcacatgtgactagatttagtgcctggcattttgtgaaatatggcttttgaaagcctccctcccccaacctggggtaactttagccatgaccttgaatctatttttgacttttggaagtgttctttgatattaagttctttgtacatttacctgctgactaaatcaacagggcagaacaagagcacatagagtggggaaaagggtctgaaagtgtgactgtggccaccccaccttccattacttcaccttgctcatgcatatccactcgactgaaaacatgcagtggcttcttagttgtccatgtatccatgtcaccataagcagtggttgttcttaaagtggttttggttttcatttgacaccacagtacagttttctcttttacaaaacccaatgagtgcttgctgtggcatttggatgtgtgttaatgtatttgtttggtctttaaaaaaataaaacctttcttaatttaagctctcattctttaaaggatgagtattttttagctttaactgtgagttcaccttgtaaacaactgtgttgaggacagcctggtacatatatacaatttgtcatcggcctatggattaaaaaagggtaataattctttgt

SEQ ID NO: 111 - DNA, 3145 bp, Mus musculus
ggggttagaatcgagggaattaatggttcctagcaaacgttgctcgcggtcgccgccaccggaacttgttctgattcgctggctccgtcgggaggcacggaacccattttggcagggaaccacttcccgaagcgcgaggcaggaagttatcctttacctctggtgtctactgaggagggtgcccgctgcagtgtcagctggtggacgggcaagagagcgttcgagtccccgctgcagttaagagccagactccgtcgcagcgccacggcacgctccgccagcctcaagccgggtgcggctgcacggggagctcttgccggctccctgaagtcgctcctgtgggcagcgacccaggcttcgcctgggccacctgccagggatctggctccctgctgcaaaacagcgaccagtctctccgcgtccgccctcccggcgttgaaccaccgtgacccgggtccagagagactgccttggacctgggactagactgatcaaaacgccagcctcaggcccccacacaccgggctctgcgtcgtctctgatatgtcaccgaccatctcccacaaggacagcagtcggcagcggcggtcaggcatgtttagccacgctctggatatgaagagtggcccgctgccaccgggcggctgggatgacagtcgccgagactcggtgggcggggagggggaccgggaagttcttctaggtgatgccggccctggtgacttacctaaagccccgcggagctatagatccgaactaagtagcattttgttactactctttctttacgtgcttcagggcattcccttaggcctggcggggagcatccccctcattttgcaaagcaaaaatgttagctatacagatcaggctttcttcagttttgtcttctggccattcagtcttaagttgctctgggctcccttggttgatgccgtctactttaagaactttggtcgtcgcaagtcctggcttgtccctactcagtatacactaggaatcttcatgatatatttatccactcaagtggaccgtttgctcggaaatattgatggcagaacaccggatgtagttgctctcactgtgacattcttcttgtttgaattcctggctgccacacaggacatcgctgtggatggttgggcattaactatgttatcccgggaaaacgtgggctatgcttcgacatgcaattctgtgggccaaacagctggctactttttgggcaatgttttatttttggctcttgaatctgctgacttttgtaacaaatacttgcggtttcagcctcaacccaggggaatcgttaccctttcagattttctatttttctggggaactgtatttttaataacaacaacattagtagcccttctgaaaaaagaaaacagagaagcgtcaatagtaaaagaagagacccaagggatcacagacacttacaagctgctattctcaattataaaaatgccagcagttctggccttttgccttctgattctaacgtcaaagattggcttctcagcagctgatgctgtgacaggcctgaagctggtggaagaaggggtgcctaaagagcacctggccttactagctgtcccaatggtccctctgcagataatcctgccactcctcatcagcaagtatactgcaggtccccagcctctgaacatattttacaaagccatgccctacagattattgcttggattagaatatgctctacttgtttggtggactcctaaagtagagcatcaaggaggattccctctatattactatattatagtgctgctgagttatgcattacatcaggtcactctgtacagcatgtatgtgtcgataatggctttcaatgccaaggtcagtgatcctcttattgggggaacatacatgacccttttaaacactgtgtctaatctgggaggaaactggccttctacagtggctctttggctagtggatcccctcacagtgaaggaatgtgtaggagcttcaaaccagaattgtcggacacctgatgctatcgaactttgcaaaaaacttggaggctcgtgtgttacagctctggatggttactatgtggaatccattatctgtgttctcattggatttggttggtggttctttcttggtccaaaatttaaaaagttacaggatgaaggaccatcctcatggaagtgcaaaaggaacaactgatgccaacattactggacattctagaaggtaactgtagcttagtgttaccaagaaagcaatgataatcagtgtgtaggagtgtaaaataccgttttaggaaatttttaatttaaaatgccaaatagttgaaaagtacagatgtatttgtatgtttgattatattttcctttgccttatcaatgtattgaaagtttacttaaggctaggaaacaacccttttggttttattacttgatttctgttaatttactgaccaaagcatattttaagctgcagtggaatagtcatgggtggtcaccatgctgccaagtattgttagtgcctgtcattgagtcgtatttaacatgttggtacaatgtatcaagtggagcaaagcttaatatgcaggtactcactaactagattaaccttattggaagttaattctcactttgaattgtaaatttgtaaaaatgtatgtgaaatttgattgaaagaaaatgtagactactaaaacattgagttgtttttctgactataaccacattgtacaaatgaatctgttaaaaataactattttaaatgtactttctgcttttgtaagcatgaaagatttataaaaagattatccaaactatttttttataaaatgagagctatggtttttaatttattgatttccctatctctccctccctttgggggaagctattttgatttcttgttaactcttgccctaggtttacatatgattttgtcacaaatacatcatgacacacagacaactaatgaggggatcaagtttgtggtgtgtttgtgattatgactgagttgtaaaaataaaaatttaatgtcattcttactgtagttttttttaattcccatgagaagaaaatgtaaacttataattaaataaaatttaaatgggtaccccaaaaaaaaaaaaaaaaaaaaaaaaaaaaaaaaaaaa

SEQ ID NO: 112 - DNA, 3967 bp, Mus musculus
ggtagactcggggctgtcaaagttgtagcgctcctcgagggtcggtcccgccacgtctcttcccggtctctctggctctggagtgctttccccccgcggagggtgggagcgcggggacagacgggcgagatgagcaccatgtttgcagacacgctgctcatcgtctttatctccgtgtgcaccgcgctgctcgccgagggcataacctgggtcctggtttacaggacagacaaatacaagagattgaaggcagaagtggaaaaacaaagtaaaaaattagagaagaagaaggaaactataacagagtcagctggtcgacaacagaagaagaagatagagagacaagaagagaaattaaagaacaacaatagagacctgtcaatggtacggatgaaatccatgttcgcgattggcttttgttttactgccttaatgggaatgtttaattccatatttgatggtagagtggtggcaaagctccccttcactcctctgtcttacatccaaggactatctcatcggaacctgctgggagatgacaccacggactgctccttcatcttcctgtatatcctctgtaccatgtcaattcgacaaaacatccagaagattcttggcctcgccccttcacgagctgccaccaagcaggctggtggatttcttggcccaccacctccgtctgggaagttttcctgaaggaaagcagaattctgaatttcctgtcatactttttagacattcacatcagacttacagagcacctggccacattctagccttgtctcctgttcaaaatgtgggattgtcccagtgtacactttgaacgtgttccagttggctttctggtgttttgtcaaacactggccagaaccagaagcagcttaggggaggaaaggggttttcagcctatgcttccgggtcatagttcaccattgggggaaaagaggttagaactccagcaagacccaaggcggaagctgtggaggatggctaccagctagctaactctgccttgctctcagttcgcctcctcttagcagccgggcccacccacctagaaaagctcacatactgtaactgtgcagggttggagcaggccctcctccatcactcaccaatccagagactctcacagacatggctacaggccagtctgacctagggaacttcttagttgatagtccctcttgccaggtgactctgggttccataaaggtgacagtagaaacagtacgaactgtaagcttggaaaggaaagggacagtgcagtgaggggaactcgtgcttgtctcgaggactcctgcttgactggcagcagccgctgacggaagaggaagggctgcttcccctttactggagagtagtatggagttccgtcccagcactagatgctcatgggcactgccttgctgtttctagacctttctgcgagcataatatgtgctgctatttcaaaggaagatccatcgtgagctcaaactgcccagggtaggatctttctttccttctctgacttgcattccctttatcaaatgttcatttaggattgcagggtttagaacaggaactatggatggggagaaccacacacttacccatgggcatacacacacacacacacacacacacacacacacacacacacacacacatacacacacacacacacacacacacacacacacacacacacacacacacatatacacacacacatggaagtcccaacagtagtgcaagcgttagccagcagtgtgagtgaagtttctggaatgtaccgattttgatagggaacagtgaagattgtttggggtacatcccactggggactcagtcgtcgaatcactgagatttcgggtaacagttctctgattttaattttcagaggctgctttttaagtgacttggtagtgttgggaatcacacctgggactgtgctccttgcagataagcactgtgccactgagctctgtcctcagctccagagattgtactgtaatttcacgttacagccatacagggtttttagtgggtttctaggccaccagcaaaaatctgagtagatggaggtggttgtgcttgtttactgagtgtaactgtgatcataagactccacatgggagaaccatgggcaggtgctaaggttatctgaagtaatttaattttaaaccagtgctggggtcatcgagaacacccctgcagtagtccttctggggagcagatgaagtcctgtgtgtgtgtgtgtgtgtgtgtgttgttgttgttgttgttgattagagcacagccatggtaaggacccccgtgtctcagacccatgggaatggcaagaccaccttgtgcaaggtttctcagacctgtgcatagttgggttagacttctctcccaaaatttctatttaagcttctgatataagtcacttgttaaataattaacagacctatttatgcctcagttttctgatctgggaaagagttaataaccttgtgaaagccctttacagtctccatgtagctgactctggacagagtctgcctgactcctgcccatcttgctttggttcctacagtttggattgcataacattggtctacttgttcttttaattagatatgttggttacatagtatttgcttctatgaaaactaaattgaatggtctagattgacctaataagtcaagcttcctgttcaggccaccattacagaatagcatccatggccctgtgctaccccatggccatgggcctcaacaatggctacaaggtgacaaagaacgtcagcaggccagggcatggttatgccagggggtgtcctccaccaacacaccagattcctgccggacctgatcctggaggcgtgccccttcacaccgtaggagtggtgcactgaaggtctccagggacaggtgtgtgttcatcattcaaacttgaggacttgacccatggtgggaggagcgaacagaagtctgaatgttgtccttaatttcgtcacacactgtggctcatgagcactcacatcatatacatctcccacacacatgctaaaaggaataaataaaaagttaaaactaaggtgaatgctgaagccacgggtggaagtttatgcctgtaataccagcacttaggattggcagcaggaggatcagagaaggtcaagtcaacagcctgagatatttgagaccctgtctccgtaaaacaagcaacaggtttagagatttttacatgatttgtcctcaaatcccatactagtagatcagaaaaccagcaaacactctgacccttggggttcgggttccttgtctttctacctcatagctgcagtgctgactcctttggtcctgttaaagtcttcagttacttagcgggagtctcgagttccactgccccgtgttcagatggcttcatggaaggtaagtacaaactcttagaaaaaattgtgactaatttgttaaaatatttccttgctccgataatccgatctgaatatttttattaaaaagccttctttaatgatgaattaacgcttcctttaatttattccactgttgccacactgtaaggaaggagacaggtgcaagtctagtgagatgataatcaaatggccactttttgcaggtggaagctaaatatatttttgtatggatccaggattcattggctgctgaagaaattcaatagagtcaagggctttttttttcttagtgcaaaagtagctttcaggtttataattatttcagccattttctgaacagctaaatcgaccttcacagctgtcttatgaagagagctaagaaatcgcggagactgcttgacctggtggtagaagattccattcacaggaaaaataaatgcgttttaaagcaagatgcgacaataaacacttcagcaccgtgcttttcctgcttgctttctaaactacaacccagggaaaagcatctattatcacaatccaaataaagaagtttcttg

SEQ ID NO: 113 - DNA, 2684 bp, Mus musculus
gaaaaacagagcggggctgactgtagcgtggagcgcgagccgggctggacgcgcgcaagcccttgccggggacccgcgaggcaagcagtctccctgtggagcgtcgtcctccatccctgtaagcaccgttacagagaatgaaacaagggcagaagttacagagcccgtgaggcatcttcaaatagaagactggagactagaaaaagaatattgccaggagttggcatccattggaagaccttgagatcctctcagctcagaactccaggaccgatgcatcttcccaccaccttgaagcactgagccctccagagctgcatctgggaagactcgcctgcctccagcatgagttctgaatgtgatgttggaagctctaaagctgtggtgaatggcttggcatctggcaaccatggaccagacaaagacatggaccctaccaaaatctgcactgggaaaggaacagtgactcttcgggcctcgtcttcctacaggggaaccccaagcagcagccctgtgagcccccaggaatctccgaagcatgaaagcaagtcagatgaatggaaactttcttccagtgcagataccaatggcaacgcccagccctccccacttgctgccaagggctatagaagtgtgcatcccagcctttctgctgacaagccccagggcagtcctttactaaacgaagtttcttcttcccacattgaaaccgattcccaagacttccctccaacaagcagaccttcgtctgcctacccctccaccaccatcgtcaaccctaccattgtgctcctgcagcacaatcgagagcagcaaaagcgactcagtagtctttcagatcctgcctcagagagaagagcgggtgagcaggacccagtaccaaccccagcagaactcacttcgcccggcagggcttctgagagaagggcaaaggatgctagcagacgggtggtgaggagcgcacaggacctgagcgatgtgtctacagatgaagtgggcatcccactccggaataccgagcgatcgaaagactggtacaaaactatgtttaaacagatccacaaactgaacagagatgatgattctgatgtccattcccctcgatactccttctctgatgacacaaagtctcccctttctgtgcctcgctcaaaaagtgagatgaactacatcgaaggggagaaagtggttaagaggtccgccacactccccctcccagcccgctcttcctcactcaagtccagcccggaaagaaacgactgggagcccctagataagaaagtggatacgagaaaataccgagcagagcccaaaagcatttacgaatatcagccgggcaagtcttcggtcctgaccaatgagaagatgagctcagcagtcagcccgactccagacattacgtcagagcctcctggatatatctattcttccaacttccatgcagtgaagagagaatcggacgggacccccgggggtctcgctagcttggagaatgagaggcagatctataagagtgtcttggaaggtggcgacatccctcttcagggcctcagtgggctcaagcgaccttccagctcagcttccactaaagattcagagtcaccaagacattttataccagctgattacttggagtccacagaagaatttattcggagacggcacgatgataaagagatgagacctgctcgagccaaatttgactttaaagcccagaccctgaaggagctgcctctgcagaagggagacgttgtttacatctacagacagattgaccagaactggtatgaaggtgaacaccatggccgggtgggaatcttcccacgcacctatatcgagcttcttcctccagctgagaaggctcagcccagaaagttggcacccgtacaagttttggaatatggagaagccattgcaaagtttaactttaatggagatacacaagtagaaatgtctttccgaaagggggagaggatcacgctgctccgacaggtggatgagaactggtatgaagggaggattcctgggacatctcgccaaggcattttccctatcacctatgtagatgtgcttaagaggccattggtgaaaacccctgtggattacatcgacctgccttattcttcttccccaagtcgcagtgccactgtgagcccacagcaacctcaagcccagcagcgaagagtcaccccagacaggagtcagccctcactggatttgtgtagctaccaagcgttatatagttatgtgccacagaacgatgatgagttggaactccgagatggagatattgttgatgtcatggaaaaatgtgacgatggatggtttgttggcacttcgagaaggacgaggcagtttggtacttttccaggcaactatgtaaaacctttatatctataagaagactaaaaagcacagagattattttttatcggaggatgaagcatcattcatgaactggtctctttatttaagtactgagtcagtaagaaaactaatgcagttggtaaagaattcaaagaaggaacagagaagtgtgtttgaaacccattgtgtatcagggattaactatctgctgaagacatctgtatttacatgactgcttctgggagctgctctagcccccgctgcttggggaatctgatctggagcatgtccatgagcaacattagccaaaaaaaaaa

SEQ ID NO: 114 - DNA, 866 bp, Mus musculus
  modified_base (777)..(777): a, c, g, t, unknown, or other
gcctgctgacactctgtggggcttacactgggcctgggagtgctgctttgggaaacatgaatctcctattcagactagcagttttccttagcctgtggtgttgttccgatgctcagggacaaacaaaagaagaaagcactgaggaagtgaaaatagaagttttgcaccgtccagaaaactgctccaaaacaagcaggaaaggagacttgctaaatgcccattacgatggctacttggctaaagacggctccaaattctactgcagccggacacaagatgaaggccaccccaaatggtttgttcttggtgtcggacatgtcataaaggggctggacattgctatgatggacatgtgccctggggaaaagagaaaggtgattatacctccttcatttgcatatggaaaagaaggctatgcagaaggcaagattccacccaatgcaactctgatgtttgagattgaactttatgctgtgaccaaaggaccaaggagcattgaaacatttaagcaaatagacacggataatgaccggcaactctccaaagctgagatagagctttacttacagaaggactttgaaaaagatgcaaacccccgtgacaagtcatatcagaaggcagttttggaagatatctttaagaaaaatgaccacaatggagacggcttcatttctcctaaggaatacaatgtgcaccaacatgatgagctataaatataattacttctctatttgttagtaactcacatactttgcttttaaaaaaataccaccgttntctatgttgtggttatacctgttttcccttgtgagaagatatttgttccttcaataaacataattttggtgtattaatgtaaaaaaaaa

SEQ ID NO: 115 - DNA, 2147 bp, Mus musculus
gaattccccgtgccggcaccgcagctgcggcgtctcgagtcggtggacgcgccctcccgccggcctcgccgcccgcgcaaccgccgtcctccggcctcggctgcgtcgcgccatgcggcccccgcgcgcggcggccgtgctcctgctgctgctggcaggccttgcacatggcgcctcagcactctttgaggtgaaaaacaatggcacaacgtgtataatggccagcttctctgcctcctttctgaccacctacgagactgcgaatggttctcagatcgtgaacatttccctgccagcctctgcagaagtactgaaaaatggcagttcttgtggtaaagaaaatgtttctgaccccagcctcacaattacttttggaagaggatatttactgacactcaacttcacaaaaaatacaacacgttacagtgtccagcatatgtattttacatataacttgtcagatacagaacattttcccaatgccatcagcaaagagatctacaccatggattccacaactgacatcaaggcagacatcaacaaagcataccggtgtgtcagtgatatccgggtctacatgaagaatgtgaccgttgtgctccgggatgccactatccaggcctacctgtcgagtggcaacttcagcaaggaagagacacactgcacacaggatggaccttccccaaccactgggccacccagcccctcaccaccacttgtgcccacaaaccccactgtatccaagtacaatgttactggtaacaacggaacctgcctgctggcctctatggcactgcaactgaatatcacctacctgaaaaaggacaacaagacggtgaccagagcgttcaacatcagcccaaatgacacatctagtgggagttgcggtatcaacttggtgaccctgaaagtggagaacaagaacagagccctggaattgcagtttgggatgaatgccagctctagcctgtttttcttgcaaggagtgcgcttgaatatgactcttcctgatgccctagtgcccacattcagcatctccaaccattcactgaaagctcttcaggccactgtgggaaactcatacaagtgcaacactgaggaacacatctttgtcagcaagatgctctccctcaatgtcttcagtgtgcaggtccaggctttcaaggtggacagtgacaggtttgggtctgtggaagagtgtgttcaggatggtaacaacatgttgatccccattgctgtgggcggtgccctggcagggctgatcctcatcgtcctcattgcctacctcattggcaggaagaggagtcacgccggctatcagaccatctagcctggtgggcaggtgcaccagagatgcacaggggcctgttctcacatccccaagcttagataggtgtggaagggaggcacactttctggcaaactgttttaaaatctgctttatcaaatgtgaagttcatcttgcaacatttactatgcacaaaggaataactattgaaatgacggtgttaattttgctaactgggttaaatattttgctaactggttaaatgttaatatgttaccaaagtagagctctaaagaggatgagaaggctccactgatttgacttttaagacttggtgtttggttcttcattcttttactcagatttaagccttacaaagggaatctctggtccagacccttgggcctggcaagggtggctgatggttaggctgcacacttaagaagcaaacgggagcagggaaggcttgccacacaggcacgcacagggtcaacctctggacacttggcttgggctacctggccttgggggggctgaactctggcatctggctgggtacacaccccccaatttctgtgctctgccacccgtgagctgccactttcctaaatagaaaatggcattatttttatttacttttttgtaaagtgatttccagtcttgtgttggcgttcagggtggccctgtctctgcactgtgtacaataatagattcacactgctgacgtgtcttgcagcgtaggtgggttgtacactgggcatcagctcacgtaatgcattgcctgtaacgatgctaataaaaagtctccttctttgtctgtcaaaaaaaaaaaaaaaaaaaaaaaaaaaaaaaaaaaaaa

SEQ ID NO: 116 - DNA, 5363 bp, Mus musculus
acggactcgggggtggctgccaggcagggttgtgagcgacgccgcggcacagcgcggagccgggaagccctagagcactgcgcccctcctgaccctcgggaccgggcgcggctagcctgcgggtttctcctccgcggccagctcgggcagcccgagtctcctctgtcgcccgcacctgcgcgtcgcgtcgtcccgccctcgggccggctcacctgggcgcacggcgggcagggcgccgcctccgggacgcaggtggagcgggcagggcgcggggcaccatgagcagcggcgccaacatcacctatgccagccgcaagcggcgcaagccggtgcagaaaacagtaaagcccatccccgctgaaggaattaagtcaaatccttctaagcgacacagagaccggctgaacacagagttagaccgcctggccagcctgctgcccttcccgcaagatgttattaataagctggacaaactctctgttcttaggctcagcgtcagctacctgagggccaagagcttctttgatgttgcattaaagtccacccctgctgacagaaatggaggccaggaccagtgtagagcacaaatcagagactggcaggatttgcaagaaggagagttcttgttacaggcgctgaatggctttgtgctggttgtcacagcagatgccttggtcttctatgcttcctccactatccaagattacctgggctttcagcagtctgatgtcatccatcagagcgtatatgagctcatccatacagaagaccgggcggaattccagcgccagcttcactgggctctaaacccagactctgcacaaggagtggacgaagcccatggccctccacaggcagcagtctattataccccagaccagcttcctccagagaacgcttctttcatggagaggtgcttcaggtgccggctgaggtgcctgctggataattcatctggttttctggcaatgaatttccaagggaggttaaagtatcttcatggacagaacaagaaagggaaggacggagcgctgcttcctccacaactggctttgtttgcaatagctactccacttcagccaccctccatcctggaaattcgaaccaaaaacttcatcttcaggaccaaacacaagctagacttcacacctattggttgtgatgccaaagggcagcttattctgggctatacagaagtagagctgtgcacaagaggatcggggtaccagttcatccatgctgcagacatacttcactgtgcagaatcccacatccgcatgattaagactggagaaagtggcatgacagttttccggcttcttgcaaaacacagtcgctggaggtgggtccagtccaatgcacgcttgatttacagaaatggaagaccagattacatcatcgccactcagagaccactgacggatgaagaaggacgagagcatttacagaagcgaagtacgtcgctgcccttcatgtttgctaccggagaggctgtgttgtacgagatctccagccctttctctcccataatggatcccctaccaatacgcaccaaaagcaacactagcaggaaagactgggctccccagtcaaccccaagtaaggattctttccaccccagttctcttatgagtgccctcatccagcaggatgagtccatctatctgtgtcctccttcaagccctgcgctgttagacagccattttctcatgggctccgtgagcaagtgcgggagttggcaagacagctttgcggccgcaggaagtgaggctgcgctgaaacatgagcaaattggccatgctcaggacgtgaaccttgcactctctggcggcccctcagagctctttccggataataaaaataatgacttgtacagcatcatgaggaaccttgggattgattttgaagatatcagaagcatgcagaacgaggagttcttcagaactgactccaccgctgctggtgaggttgacttcaaagacatcgacataacggacgaaatcctgacctacgtgcaggattccctgaacaattcaactttgctgaactcggcttgccagcagcagcctgtgactcagcacctaagctgtatgctgcaggagcgcctgcaactagagcaacagcaacagcttcagcagcccccgccgcaggctctggagccccagcagcagctgtgtcagatggtgtgcccccagcaagatctgggtccgaagcacacgcaaatcaacggcacgtttgcaagttggaaccccacccctcccgtgtctttcaactgtccccagcaggaactaaagcactatcagctcttttccagcttacaggggactgctcaggaatttccctacaaaccagaggtggacagtgtgccttacacacagaactttgctccctgtaatcagcctctgcttccagaacattccaagagtgtgcagttggacttccctggaagggattttgaaccgtccctgcatcccactacttctaatttagattttgtcagttgtttacaagttcctgaaaaccaaagtcatgggataaactcacagtccgccatggtcagtcctcaggcatactatgctggggccatgtccatgtatcagtgccagccagggccacagcgcacccctgtggaccagacgcagtacagctctgaaattccaggttctcaggcattcctaagcaaggtgcagagttgaggtgttttcaatgaaacctattcgtccgacttgagcagcattggccacgctgctcagaccactggccatctccatcacctggcggaagcccggcctcttcccgatatcacacccggtggattcctgtagctcccatgccaggatgaaattcattcaggaacaggataccagaactgtgagggttggacatcagtacactttctccaaaacagatttcgattcttgtgtttagagaaggagtttaaaacccgtacctgagatgctccctatacgatgggagagctcggacggagcacatgggaggagttcaggcacctcagagtgcacagtgtttactgtgaaaaattctcgggttccctgctcagtaacttcagcaggaaaaacagggaggtatttggagctttgaacttctggattcttgttagtataccaaatacggagttacaggactaaccgatttcctatattttttaacctctgtttttgtcccagaagttaaagtaaatggtttggtgcttttctcaaaagaaaatctcaatgctttctttctgcactgttaatataagtgcctcactttttgttgttgttgttgttgttttctgatttttttctttttttctatctacctgtaacacaatagggtatgtattttatatgaaatattttttatcttttttgaattaatattctttctgcacaaagaaagtttcccgaatcccaacctttctatgaccccgctgtgtgtgtgcactactcatcctttccttcagataaagagtaaattgataactcaaagtccactatttattgtgtaatatacctgcttctggccgttagatgttcctctgtgccttatgttgaaaaatttgaaaaataacatgttgcccaaattatttaattattacatactattagagagtagcacttgtattttaaccgtgttttctgagacgtgagataacgctgctgctgaaggtttcccagaaacctccacgatgagatcagaaggccaccgtagaaagtgctaaaggtgcctatgtccactacgctgcagtgaggggaggtggcgtgtgtcaagcctgttagctatattaagcagagcactcatttcactctgtctaaattatctttgaaaaactgtctgtaatcctgtttgtgatattgactttataaattccacttcttatactagtggaagctattcatttttctcatatttgaggagtgttaagatggaagatgccatgtcaggtgcaaggtgttttaatgactgaaatgaatggtgcattgtataaacataacgaacaaaataatctgtaaaatattcgcagttttcatttaagaatagttcttacctcatatgcattttttcagtgtatcttgtaaagaaatcaagtagtaaattgaagcttttacgttggcattaagataaagataaatacaatttgttcacctccataccttaagttgtttatgtgatacaccctttgctgccaatatggcaaatgtgtcactctgccaaatgcactgttctcaaacggcttaaagaaaaaatgctggtgtctgccattgtctctgttcttgcttagatatgatatatgaaggatgtggtcctggatctgtttttcatatgttatataaaaagctgatgagatcccaaactgagatgtattcaaatccagaagtggttctcaacctgtgctctgtggctcccgtgggagatagactgaccctttcacaggggtcccctaagaccattggaaaacacagatatttgcatcacaatttataacagtagggaaattacagttttaaagtagcaatgaaaataattttatggttggggtcctgagcaactgtattcaagggtcacagcattagaaaggttgagatccactgaaatgttgactcttctttttttcttttagaaaattaatgtatgtaaacatgcctttgggaaaaagatctcttctatgcattttcagtcaaaattctgaatctctaggattaagcattgaaaaacaactgtctaaaacatttcacaatttttttccagcatgaggtgtcaccaaggatttagactggtggtctgaattagtatcccacttttctatgtaaacttttcattaaaagttgtcatagaaaccattttgtcagtctcttctgcatgttaccaaatattcagttaaaaaaaagaagacaactttggacactgagagtatggtggcatttaattacacacttatcaaactgaaagtcttaaaaacaatattgtgtgtcttatctatataaaaatagctaaaacatctaagaataataaaatcacattaaactgcctatttgtttgtctgtattgccaagtgccaaatggaaagaccacttagagcaccactagactgagggattaacttctagatgaaattctaagactcttgtgtatgtctgattgaagttcttcttttctaggtgtttcttacagcacctgaacacttaaccaatatgccagtgtatcaacttttcaattgttactatgcacaagctagtttgagtatcaatagatcttaggtctacatagctccttgctgtcctttaaactgttacttgcttacatatgccatgcatagatttttgttaaagtatgatttataatgtccttaaatatcaaag

SEQ ID NO: 117 - DNA, 3460 bp, Mus musculus
ggacagcaattttttgaaaggaagttgttctgaaagcatgtttacaattcactgacactgttgactgttctctttaaaataataagacgctttgagaagattgtatttatggtaaaaggaaactggactaacaatgaggccaaagacttttcctgccacaacttactctggaaatagccggcagcgattgcaagagattcgagaggggctgaagcagccatccaaggcttccacccaggggctgctggtgggaccaaacagtgacacttccctggatgccaaagtcctggggagcaaagatgcctccaggcagcagcaaatgagagccaccccgaagtttggaccttatcaaaaagctctcagggaaatccgatattccctcctgccttttgccaacgagtcaggcacttcggcagctgcagaggtgaaccggcagatgcttcaggagttggtgaatgcgggatgtgaccaggagatggctggcagagcgctcaagcagacgggcagtaggagtatcgaagctgccttggagtacatcagtaagatgggctacctggaccccaggaatgagcagattgtgcgagtcatcaagcagacctccccaggaaagggcctggcgcccaccccggtgactcggcggcccagtttcgagggcacaggggaagcactcccatcctaccaccggctgggtggtgcaaactacgagggccccgccgcactggaggagatgccgcggcaatatttagactttctcttccctggagccggagccggcacccacggtgcccaggctcaccagcatcctcccaaagggtacagcacagcagtagagccaagtgcgcactttccgggcacacactatggtcgtggtcatctactatcggagcagcctgggtatggggtgcagcgcagttcctccttccagaacaagacgccaccagatgcctattccagcatggccaaggcccagggtggccctcccgccagcctcacctttcctgcccatgctgggctgtacactgcctcgcaccacaagccggcggctaccccacctggggcccacccattacatgtgttgggcacccggggtcccacgtttactggcgaaagctctgcacaggctgtgctggcaccgtccaggaacagcctcaatgctgacttgtacgagctgggctccacggtgccctggtctgcagctccactggcacgccgcgactcgctgcagaagcagggtctagaagcctcgcggccgcatgtggcttttcgggctggccccagcaggaccaactccttcaacaacccacaacctgagccctcactgcccgcccccaacacggtcaccgccgtgacggccgcacacatccttcaccctgtgaagagcgtgcgtgtgctgcggcccgagccccagacagccgtggggccctcgcaccccgcctgggtggctgcccccacagcacctgccactgagagcctggagacgaaggagggcagcgcaggcccacacccgctggatgtggactatggcggctccgagcgcaggtgcccaccgcctccgtacccaaagcacttgctgctgcccagtaagtctgagcagtacagcgtggacctggacagcctgtgcaccagtgtgcagcagagtctgcgagggggcactgagcaagacaggagtgacaagagccacaaaggtgcgaagggagacaaagctggcagagacaaaaagcagattcagacctccccggtgcctgtccgcaagaatagcagagatgaagagaagagagagtctcgcatcaagagttactccccttatgccttcaaattcttcatggagcaacacgtggagaatgtcatcaaaacctaccagcagaaggtcagccggaggctacagctggagcaggaagtggccaaagctgggctctgtgaggccgagcaggagcagatgaggaagatcctctaccagaaggagtctaactacaaccggctgaagagggccaagatggacaagtccatgtttgtgaaaatcaagactctaggcatcggtgcctttggggaagtgtgcctcgcttgtaagctggacactcacgctctgtacgccatgaagactctcaggaagaaggatgtcctgaaccggaatcaagtggcccatgtcaaggctgagagggacatcctggctgaagcagacaatgagtgggtggtcaaactctactactccttccaggacaaggacagcctgtactttgtgatggactacataccaggcggggatatgatgagcctgctgatcaggatggaggtcttccctgagcacctggcccgcttctacattgcagagttgaccctggccattgaaagtgtccacaagatgggctttatccaccgggacatcaagcctgacaacatactcatcgacctggatggtcatattaagctgacagattttggcctctgcactggattcaggtggactcacaattccaagtactaccagaaagggaaccacatgagacaggacagcatggagcccggtgacctctgggacgatgtttccaactgtcgctgtggagacaggttaaagaccctggagcagagggcgcagaagcaacaccagaggtgcctggcacattctcttgtcgggacaccaaattacatcgctccggaggtgcttctccgcaaagggtacacgcagctctgtgactggtggagcgtcggtgtgattctctttgagatgctggttgggcagccgcctttcttggcccccacccccacagagacgcagctgaaggtgatcaactgggagagcacgctgcatatccctacgcaggtgaggctcagcgctgaggcccgagacctcatcacgaagctgtgctgcgcggctgactgccgcctgggcagggatggggcagatgacctcaaggcacacccgttcttcaacaccatcgacttttcccgtgacatccgaaagcagcctgcaccctacgtccccaccatcagccaccccatggacacctccaattttgacccggtggatgaagaaagcccctggcacgaggccagcggagagagcgccaaggcctgggacacgctggcctcccccagcagcaagcatccagagcacgccttctatgagttcaccttccgcaggttcttcgatgacaacggctatcccttccggtgcccgaagccctcagagcccgcagagagtgcagacccaggggatgcggacttggaaggtgcggccgagggctgccagccggtgtacgtgtaagcctcagttaaccacaactcgaggaaacccaaaatgagatttcttttcagaagacaaactcaagcttaggaatccttcatttttagttctggtaaatgggcaacaggaagagtcaacatgatatcaaattagccctctgaggaccttcactgcattaaaacagtatttttaaaaaattaaaaaaaaaaaaaaaaaaaa

SEQ ID NO: 118 - DNA, 4349 bp, Mus musculus
  modified_base (154)..(154): a, c, g, t, unknown, or other
  modified_base (181)..(181): a, c, g, t, unknown, or other
  modified_base (296)..(296): a, c, g, t, unknown, or other
  modified_base (824)..(824): a, c, g, t, unknown, or other
  modified_base (1528)..(1528): a, c, g, t, unknown, or other
  modified_base (2135)..(2135): a, c, g, t, unknown, or other
  modified_base (2748)..(2748): a, c, g, t, unknown, or other
gatgtgcacgctttagggactgagtcaggggctcaaagaacaggggagcgagccataggctagaggggtgattttggacactggggatggcacagggggcatgagagatccagaagtgaaatccaaacttccaagcggcttctagaacattctnagtacaactgagaaggcacttgtgacncttgggggtcacaaggcccccagaaagagcctctggctacctgggcctaactgttctctaaacattagagtgtaaggatgtgttacactcacggccaagggccgaaagaacacantcctgaactctgctatggagctaatccaggggttgccccttaactgaggtgatcaccaacagagatggaagctagacagtcatgggtgaacctgctgttaccagccatttggtcaagcctggcttctgtggctggagacccttgtgatttcgccgacacaggtgccacttggcagctacagcactggtctgctgaaggcctagcagctggagctgaaatctgttccccctggcatctgattccctgctctaaccttagctggggtcttggaaaagaatttcggtagttgtgggtagcaagacccttgaaacaaagaggagaaaaaactcaggtgagccgttttagctgacatggcttacctgctagaatccactagtaagtgcccttcctggggcctggggactctgtgtggcttccatcccaaaagatccttctatcaattcaaaaggtcatgagcgcgtctttaaaggtaatatttaagctgtatttgcttgggacgacccaggttgcttgaacagaatgagcatntggatacagcgccaccgccaccctaccccacacccatcctgctctctgactcttgagtcttaggcacataccttgtggcacaggccctccctctggtggctgcctaacactggggaggctcagtcactggcagtaatagtcagagtgcgcgtgcacacgtgcgtgctgtgtgtctcggggctctgagctttattcacctcttctttcccaggatcctgcaggcccaggtaccaccggtgttcctccatcagcagcagtaccagtacctgccacagccccaggagcactctccacccctccacccggcagctctgggccatggacccccaagctcctttggtccacctgcagtggagggaccacccagtgcccaggccaccttgggcagtgcccacctggcccagatggagactgtactgagggagaatgccaggctgcagagggacaatgagcgattgcagagagagctggagagcacttcagagaaggctggccgcatagaaaagctggaaaatgaaatccagcggctctctgaggcccacgagagcctgatgaggacctcttccaagcgtgaggccctggagaagaccatgaggaacaagatggacggtgagatgagacggttgcaggacttcaaccgagaccttagagagagattggaatcggcaaaccgccacctggcaagcaagacccaggaagcccangcgggcagtcaggacatggtggcgaaactgcttgcccagagctatgagcagcaacaggaacaggagaagctggagcgagagatggcactgctgcgcggtgccatcgaggaccagcggcgacatgctgaactgctggagcaggctctgggcaatgcacaaagccgtgccgcccgggctgaagaagagctacgcaaaaagcaggcctatgtggagagggtggagcggctgcagcaggcactggggcagttgcaggctgcctgtgaaaagcgagagcagttggagctgcgtctgcgcacgcgcctggagcaggaactcaaagccttgcgtgcacagcagaggcagacaggcaccctcgcaggtggtggcggcagccatggtgggtccgccgagctcagtgccctgcggctgtctgaacagctgcgggagaaggaggaacagatcctggctctagaggcggacatgaccaagtgggaacagaagtatttggaagaacgggctatgaggcagttcgccatggacgcggctgccactgcggctgcccagcgcgataccactctcatccggcactccccccagccctcgcccagcagcagtttcaacgagggcntcctgccaggcaaccacaggcaccaggagatggagagcagattgaaggtgctccatgctcagatcctagagaaggatgcggtgatcaaggtccctcagcagcgctccaggaaagaccctggcaaggccacccagggcaccctatggcctgccaagtcggtgccgtccatcttcgcggctgcagtgggaactcagggctggcaagggctcgtatccagtgagcggcaaactgatgcacggccagcgggagaccgggtcccagcagaggagcctccggccacagctcctctccctgcccacaccaaacatggcagcagagacgggagcacccagacggatggccctgcagacaacacctctgcctgcttggcctcagaacccgatggcctcctggggtgcaacagtagccagaggacaccctctctggactctatagctgcaaccagagtccaggatctgtcagacatggtagaaatactgatctgaaggaaggaggcagtgccttggagaccccgaagcctggctccctcctggcattccggcagttgtcttcaaatgctgtgcctcacatcctccgaccagtgatgccttggtgcatggggctcagagaggancaccccaggggagctagctagaaaagcctgcaccccttagaagactgctttttggcctatatttctcctatgacaatgaggaaggaaaagccagacatcacctgcagccggaggcctgttgctggggcaggaaggagctaagccccctccgtcctgcctgaaggaaacagcggattctgacgcccaagaatggctgggcaccagccgagcggtctgcagggatcgttaggccagctatggtgttctgtggctaagcatggctccagccaacactatctgctcttcagttcctgactgacttcctcagatcactaagacttgaatccttgggaggtgggggacgatgggagtgtgagtctttcgggagccaccagcatgtccccttggagtaggttagaggtcacttgagaggccccgcagagcagtgtgttttgtatataattctttttccttgggaacagaagactaagcgtgccggttcagagtctcctccagggctgtgctgcctgcccctgctgccacagttcttgaaacatgtgacaggtctaccagatgttcctctgcctgcagttcctggctgtggattttgatactggttggctttcctctgctttttaaatccctgtgtttcgtgcccatgggattcttatcaccagcctttgtgaatggctccacagctcctatccctgggacatcctgtcagtttggttataaactgagccagatgtgatgagccaccacaagcggacatctgtcatgcccagcaccaggttctctttgaagaaactggagaaattgttctcataaatgtattcgttcccaccagcagggactgggagagggagctatgttgttaaaacgaatcagtgaacttaaagaaaagtcctcattatggtgcccccaccacagaatggcaccttagaggctggctcctcaagttttggtgccccagccctgaagcagggccagctacttggaattaggtgaactacccccacgtggcagaccaccagcagcagtgactttgacttctggtcttaaagcaacccccattcagctcaaaaagcgattggtggatttcagatcttttgtgtttttctcctctggttgttttgtttgtttttctttcactgtttgaattctgtctgttgtttgttccattcccatagttctctctgcatttcctttttaaacatttgcatttgctgggcaattgcgtatttttttaattccctttcccctatgtaaagctgagaaatacatctggttcatgtacgttgtttacaaagataaaagttttaaaaaaaaaaggagggggaaaagaaggcaaaaaaatattgtgaaaggaaaaaaaaacaacttaatatattttggattaatatttggtatttcttttaaagtattttttttgtgctgtgaacgttttctgccaaagaccatgacgtgtgtctgtgtgtttaagttatcatgaatatttaaagtgtaaacatggctgttttgttacgccactctgtaccaggattgctgctgcattccgccaggtatgacagtattttaataaaaaaagagcttataaaaaaaaaaaaaaaaaaaaaaaaaaa

SEQ ID NO: 119 - DNA, 2293 bp, Mus musculus
gtcttcggggcgtggtcaacgccgccatttgcgggccactaccagctagtggccgcggggccgcctcgtcccgcccccttcctgcctgggaccggccctcaaatcgactgctcgccgccgcagcgagggaagagggtgcggccgccgcggcggggactgaggcacagactgacccggcgtggaccgcggagatgctgggcgtggcggccggaatgaccaacagcaacatggccaatgccttggccagtgccacgtgtgagcgctgcaagggaggctttgcgcctgctgagaagatcgtgaacagtaatggtgagctgtaccacgaacagtgcttcgtatgtgctcagtgcttccagcagttcccagaaggactcttttatgagtttgaaggaaggaagtactgtgagcatgatttccaaatgctctttgctccctgctgccaccaatgtggtgaattcatcattggcagggttatcaaagccatgaacaacagctggcatcctgagtgcttccgatgtgacctctgccaggaagtgctggcagacatagggtttgtcaagaatgctggcagacacctatgtcgcccatgtcatgatcgtgaaaaagccagaggccttggaaaatacatctgccagaaatgccatgccatcattgatgaacagcctctgaccttcaagaacgacccttaccatccagaccacttcaactgtgccaactgcgggaaggagctaactgctgatgctcgggagctgaaaggggagctatactgtctgccatgccatgataagatgggggtccctatctgtggcgcctgcaggaggcccattgaagggcgagtagtgaatgccatgggcaagcaatggcatgtggagcattttgtttgtgccaaatgtgaaaaaccatttcttgggcatcgccattatgagaggaagggcttggcctactgtgaaactcactataatcagctgtttggtgatgtttgtttccattgcaaccgtgtcatagaaggtgatgtggtctctgctctcaacaaggcctggtgtgtgagctgctttgcctgctccacctgcaataccaaactcacactcaagaataaatttgtggaatttgacatgaagccagtctgtaagaagtgctacgagaaatttcctttggagctgaagaaaagacttaagaaactatctgagaccttaggaaggaaataacttttggtgtcttttttctctctcttctaatcaatgttacttaacctgatctacccttgcttaaaactatgtcagagcattagaatggttttcttcatttcccttttctcatttaaaaacgaaagaaaatgtttatttctatgtaaaacacagatgaaatcaggactttcatttctttagccatattagtctgtaggcattaaaagtatataaccaaaaacaaaaacaaacaaaaaaaaaaggttaaagggtagttttaattaagccatccaaaatataaatttaacttcagagttaaacaccctgctctatggaccaaccaaagcacttgctgccagcctagtactaagttgaatccttaagagagtatctgagacagtgtccacatgggtcatgtggagcaagaacttactcccacaagttgttctctaacctccacagatggccatggtgcatatgcgccaacacacagttaataaacataatagacaaccactgttataaagagtcagctttcacgggactcacataagctttgcttccctgatcgcataagaaaatcatttcccattcatatactgggaactgtatgggaagataagtgcccaaacagttcctatgttgtcatgtgcttatccagttagcattgtaaaaggaacatgcatattactaagaagcaaaaacatttcaggatgactgatttctttttttattaaatcactaagcttagttttctattttgttctccttataaatttttccttcataaaattacttaacatacttgtaactactaatgcatcttttacatttttaagcaaaacaaaacaaaaatttgccagttatctggaaaatattgcatacattgtgatgttggggaaatgaagcattttaaaactatattacacataaaatgcatagtattcaaatgggacatgaaatgcactataatgcagcttcgaatgtatggctttcaaaagtgagcgtgagccaggtgtggtggcactaggcttcaatcccagctctctgcaggcagatctctgtgagtcctaggccacccagggctgcatattaaaaccttgtttcag

SEQ ID NO: 120 - DNA, 2494 bp, Mus musculus
acaagatcttccttcctcagttctcttaaatcacagcccagggaaacctcctcagagcctgcagccagccacgcgccacgatgtctgggggcaaatacgtggactccgagggacatctctacactgttcccatccgggaacagggcaacatctacaagcccaacaacaaggccatggcagacgaggtgactgagaagcaagtgtatgacgcgcacaccaaggagattgacctggtcaaccgcgaccccaagcatctcaacgacgacgtggtcaagattgactttgaagatgtgattgcagaaccagaagggacacacagtttcgacggcatctggaaggccagcttcaccaccttcactgtgacaaaatattggttttaccgcttgttgtctacgatcttcggcatcccaatggcactcatctggggcatttactttgccattctctccttcctgcacatctgggcggttgtaccgtgcatcaagagcttcctgattgagattcagtgcatcagccgcgtctactccatctacgtccataccttctgcgatccactctttgaagctattggcaagatattcagcaacatccgcatcagcacgcagaaagagatatgagggacatttcaaggatgaaaggttttttccccccttactatttccttggtgccaattccaagttgctctcgcagcagcaaatttatgaatggtttgtcttgatcaagaacaaagaattcattcccaccattctcatatatactacttgtctcttctaagctactgcatctatgtttgacagtctggaatgtttaaacccattcctgctctctcttttatatgtgaatcattgtttcattggctaaaatataaacatattgttgaaagatgatttgagaaaaataggaaggactgggaggcagggaagagtaccaacaacctcaactgcctactcaaaggtgatgatgtcatacaaagggaagagattcaggttacggccatttgtttaggggcatgaaggaacgtttttaatatatgccagttatctaaggaattggttgctgtcctcactcttaacaatccagttagatttagggatttagggatcaccatcaatttggagactataatcttcatgataccaacaatgttttacttatcctggcattttaacctgttattttgtatgcctgaatatttgctatactgagaataagacctacgtgccttctaatttttcatgtttttttttttccaaataggatctaactcatctacttgcatgatgccggcagctttcctaaaaacaaaacatacaaattgcacttgctagttctctgtacttgtttctgactctgaaatacagaacctgttgatgttgatatctgtgctcagctatgtagcatctttctctctgttaagcctggtcaacattaacccaatgaaatgatttgaagcagacaaatgggggtgagacctctctggactggcagaagtagaagccagctttccctgccactcagcaactgaatgaggccagcgtgtctattcagtttcactcattttcaagaataatcacaggttcctgactctaagccagcccctcaccaggatcaaggtttagtgactgactgggatgatttaggagctcaacattgtacttccttttcagctgatgagtgaacctccagggaggggtgtcaaaaaggaggctgctaaaccgagactgccaagcctgttgtaaacatgaccccttttatgcaaagcccttgcaatagtctgcaatgctgtgaagctcgacctttccccctgcaaggaacctttgacctaatccaaccatcattttgttcagaaaggtgggggaagggtggtaacaaaagcttgaggtaatgttcttgctgtaataaattcaagtttttctgaacccaaactgaggaatttcacctgtgtacctgagtctccagaaagctgcctgcctgggacacccaaaagccttttacttcccagctcacattacagctctgcccttggggatatttttaaaattccagataggctttcattttcactttcatacatgtattggaaccctgcttgacttgttttctccttcagtcttgccgacactttaccaacctgctacctactttgattgattgcatttaaaacagacactggcatggccacagtttgaattttaaactgtgcacataactgaaagtgtactagactgtatacctttttacatgtagagatattctttatctttatataaggagaatcacttgggaaatgattctacaattcagtctgtaaactgtgtgttccaagacatgtctgttctccctagatactcagttttatacaagtcaattgctgatccaaaaggttactgaaattttatatgcttactgatatattttacacttttttatgctgcatgtcctataaagatttcaaatctgcacaataaaattgtttaacagttaaaaaaaaaa

SEQ ID NO: 121 - DNA, 2402 bp, Mus musculus
gatcctggcggtcgcggcgtcgtctcttctccacccgggcttctgggccccccgcggatgaccatgagagataaggactgagtgccagaaccgggaagagagcccgccgagaggtggcgggggctgcccactccgagggcacagcctccgcgctccggcctcgctccgccgctcgacgcctcgcgggccccgcgggggcagccgggctgggcggcgatgcccgggctggggcggagggcgcagtggctgtgctggtggtgggggttgctgtgcagctgcggccccccgccactgcggccccctctgccggtagccgcggccgccgccggggggcagctgctgggagccggcgggagcccggtgcgcgctgagcagccaccgccacagtcctcttcttcgggcttcctctatcggcggctcaagacccacgagaagcgggagatgcaaaaggagatcctgtcggtgctggggctcccgcacaggccgcggcccctgcacggtctccagcagcctcagcccccggtgctcccgccacagcagcagcagcagcagcagcagcagcagacggcccgcgaggagccccctccagggcggctgaagtccgctccactcttcatgctggatctctacaacgccctgtccaatgacgacgaagaggatggggcatcggagggtgtggggcaagagcctgggtcccacggaggggccagctcgtcccagctcaggcagccgtctcccggcgctgcacactccttgaaccgcaagagtctcctggccccgggacccggtggcggtgcgtccccactgactagcgcgcaggacagcgctttcctcaacgacgcggacatggtcatgagctttgtgaacctggtggagtacgacaaggagttctccccacatcaacgacaccacaaagagttcaagttcaacctatcccagattcctgagggtgaggcggtgacggctgctgagttccgcgtctacaaggactgtgtggtggggagttttaaaaaccaaacctttcttatcagcatttaccaagtcttgcaggagcatcagcacagagactctgacctatttttgttggacacccgggtggtgtgggcctcagaagaaggttggctggaatttgacatcacagcaactagcaatctgtgggtggtgacaccgcagcacaacatggggctccagctgagtgtggtgactcgggatggactccacgtcaacccccgtgcggcgggcctggtgggcagagacggcccttacgacaagcagcccttcatggtggccttcttcaaggtgagcgaggtccacgtgcgcaccaccaggtcagcctccagtcggcggcggcagcagagtcgcaaccggtccacccagtcgcaggacgtgtcccggggctccggttcttcagactacaacggcagtgagttaaaaacagcttgcaagaagcatgagctctatgtgagcttccaggacctgggatggcaggactggatcattgcacccaaaggctacgctgccaactactgtgatggagagtgttccttcccactcaacgcacacatgaatgccaccaaccacgccattgtacagaccttggtccaccttatgaatcccgagtacgtccccaaaccatgctgcgcaccaaccaaactgaatgccatctcggttctttacttcgatgataactccaatgtcatcttgaaaaagtacaggaatatggtcgtgagagcttgtggttgccattaagttgaagctggtgtgtgtgtgtgggtgggggcatggttctgccttggattcctaacaacaacatctgccttaaaccacgaacaacagcacagcgaagcgggatggtgacacacagagggatcgtgacacgcagacacatctcccgctggtgccttacccacggaggcttttatgaggaccttgtcaagggctttcccagttcctaactgagcagttgctggtctgcaggaagctggaaggcttgtagtacaggcctggaaactgcagttacctaatgttcgcctcccccaaccccgcccggagtagttttagcttttagatctagctgcttgtggtgtaagtaaacttgaaggaatattaaatatccctgggttgaaagacccggtggtggctctacagcacccatcccagggagatttttgcagacatccgaatggaggggagaagggcactctttcaggttccattcccagcaagggcagctcacacaggacctgcagcctggccatcagcaggctctgtggaggtgccttctgtctactgttgtagttacgtgttttgtgttgactctcggtggtgtgagaatgtactaatctctgtcaagacaaactgtagcatttccaccccatcctcctccctccctcacagaattc

SEQ ID NO: 122 - DNA, 853 bp, Mus musculus
agacctagtagctgtggaaaccatggccctgagtgtcatgtgtctgggccttgccctgcttggggtcctgcagagccaggcccaggactcaactcagaacttgatccctgccccatctctgctcactgtccccctgcagccagacttccggagcgatcagttccggggcaggtggtacgttgtgggcctggcaggcaatgcggtccagaaaaaaacagaaggcagctttacgatgtacagcaccatctatgagctacaagagaacaatagctacaatgtcacctccatcctggtcagggaccaggaccagggctgtcgctactggatcagaacatttgttccaagctccagggctggccagttcactctgggaaatatgcacaggtatcctcaggtacagagctacaatgtgcaagtggccaccacggactacaaccagttcgccatggtatttttccgaaagacttctgaaaacaagcaatacttcaaaattaccctgtatggaagaaccaaggagctgtcccctgaactgaaggaacgtttcacccgctttgccaagtctctgggcctcaaggacgacaacatcatcttctctgtccccaccgaccaatgcattgacaactgaatgggtggtgagtgtggctgactgggatgcgcagagacccaatggttcaggcgctgcctgtctgtctgccactccatctttcctgttgccagagagccacctggctgccccaccagccaccataccaaggagcatctggagcctcttcttatttggccagcactccccatccacctgtcttaacaccaccaatggcgtcccctttctgctgaataaatacatgccccc

SEQ ID NO: 123 - DNA, 2265 bp, Mus musculus
tgcggttactagccacgttgagctccaaggtggacgcgctcaggccgccgctgcctgttctgctttcagtgtctgtggaaaagttgttgctgaagtgcctgtaaaagagtcactgagttgatggagatgcctactagtgatggaagtctttcagagggcctgatttcttatctcatccgggagagaggatctgctccacggtgtgcccctgagaagcacctcagcaggctcaagcaagacgtcgcaaatacaaagatggagttgaaagcaacgcttaaggaagctcagttggcatcctgttcagttgaattacttttgccattatttaagaacactgtggaaggaattagtctagaaaacgctaatctttctgcatccagtttgaagaagatttttgaacagaacgacatattatcaaaagaattagacacttttaaccgtgtgaaattagccttagaacatcttattaaacagactgactatgaacaaataggagacagcttgctatgcttgttgaaggatctcagtgacaatgaaagtgagaacagaaaccttgaggaaaaagtacttgaaaaggagacctatatccgtgaactctcgtgtctgtttcagaatgaaaaggaaagtgctttgaaagcaaacaggctttctcaatcagtcaaagtagtgcacgatcgtctacagcgccaaattcagaagagggaagctgagaatgaaaagctaaaagaacatgtacagagcttggaaacccaaatagccaagtggaacttgcaggtgaaaatgaataagcaagaggctgtagccatcaaggaagcaagtcggcaaaaggctgtagctctgaaaaaagcatcgaaagtgtacagacaaaggctgcgacacttcacaggggatatcgagcgcctcgcctcccaagtcagagatcaggaagccaagctgtctgaaacagtttcagcttccagtgactggaaaagtcagttcgagaaaattgccatagaaaaaactgagctggaagtgcagatcgaaacaatgaaaaagcaaatcgctaaccttttggaagacttgagaaaaatggaaactcatgggaaaaactcatgtgaagaaattcttagaaaacttcactcactggaagatgaaaatgaagccctaaatattgagaatgtgaaattaaagggtacacttgatgccttgaaggatgaagttgcttctgttgaaaatgaacttgtagaactgcaagaagtagaaaaacgacaaaaaaccctcgtcgaaggatacaggactcaggtacaaaagttgcaagaagcagctgaaatggtgaaaagtagatgcaaaaatttactacatgaaaataacctaataataacgaataaaaacaaaaagttagagaaggttgatggaaaccaaagccttctgaccaagctttctcttgaggaagaaaatcatctcattcagttaaagtgtgagaaccttaaagagaaactagagcagatggatgcagagaataaagagcttgagaagaagctggccgaccaagaggagtgtctcaagcacagtgacctggagctgaaagagaaggctgcagagtacacagccctgtccaggcaactggaagccgctttggaagaaggaagacaaaaggtttcagaagaagtagagaaaatgtcatctagagagagggctttacaaattaaaatattagatctggaagctgagcttagaaagaaaaatgaagaacaaaaccaacttgttgacaagatgaacactaaaacccagcaccaggctatctgcttgaaggaaatacagcacagccttgagaagtcggagactcggaatgagagcattaagaattacttgcagtttcttcaaatttcctatgtaacgatgtttagataaattgttgattttctctgattgttatgctttgtaatttataggttagcagtattagaatttctatgtgaagatacttgaaacataatttattatctaattgaactttaaggaatagtagctcttactattcttttgtggtagataatttgcattgaagtctagtttaattctttttaaaaatatattaatttttaaaatatttttcaccatatatgcaaaaatcagaattattcttatgaaccattgaagtaaatttgtaacaaatctagaccgattatgagccaaatacatagatttaaataatgtatttactttaaataatgtatttacttgttttatattataatgctataccaataaaatattcagaaatct

SEQ ID NO: 124 - DNA, 3584 bp, Mus musculus
ggctaccgcacccgcgtggggcgtcgggcgagatggcggcgcgcagcctcggcagcggtgtggggcgactgctgcgtggcctgcaagggcgctctggacaatcggggtggtcactgagcgtgtcccgctcgaccgccacccgactcccgggctgcgttcctgcagcagcgcaaccaggctcgtaccccgcgttgagcgctcaggcagcccaggagccggccgccttctgggggccgctggcccgtgacacactagtttgggacactccttaccatactgtctgggactgtgacttcaggacgggcaagatcggctggttcctgggaggccagttgaatgtgtctgtcaactgcctggatcagcatgtgcagaagtctcctgagaccatagctttgatctgggagagagatgaacctgggacagaagtgagaatcacttacagggagcttctggagaccacatgccgcctggccaatacactgaagagacatggagtgcaccgaggggaccgtgtggccatctacatgcctgtgtccccactggctgtggcagcaatgctggcctgtgccaggattggagctatccacacagtggtatttgctggctttagtgcagagtccttggctgggaggatcaatgatgccaaatgcaaggctgttatcaccttcaaccaaggactcaggggagggcgtgtggtggagctgaagaaaatagtggatgaagctgtgaagagctgcccaacagtccagcatgtcctggtggctcacaggacggacaccaaggttcccatggggagtctggatatcccccttgaacaggagatggccaaggaggcccctgtttgcacccctgagagcatgagcagtgaagacatgctctttatgctctacacctcagggagcaccgggacacccaagggactcgttcatacacaggcaggctatctactgtatgccgccatgacgcacaagctcgtgtttgactaccagccaggtgatgtctttggctgtgtggctgacatcggttggatcacaggacacagctatgtggtgtatggacccctctgcaatggagctaccacagtcctttttgagagcaccccagtttaccctgatgctggtcgttactgggagacagtgcagaggctaaagatcaaccagttctatggtgccccgacagctgtccggctgctgctgaagtatggggatgcctgggtgaaaaagtatgaccgctcttccctgcgcacactggggtcagtgggagagcctatcaaccacgaagcctgggagtggctccacaaagtcgtgggtgatggcagatgtacactggtggacacttggtggcaaacggaaactggaggcatctgcattgcaccacggccctcggaagatggggcagagatcctcccgggcatggccatgaggccgttttttggcatcgttcctgtactcatggatgagaagggcaatgttttggagggtggagatgtctctggggccttgtgtatttcccaagcttggccaggcatggcaaggaccatctatggtgaccaccagaggttcgtagatgcctacttcagagcgtacccaggttattacttcactggagacggagctcaccggacagagggtggctattaccagatcacggggcgcatggatgatgtcatcaatatcagtggtcatcgcctggggactgcagagattgaggatgcaatggctgaccatcccgctgttccagagactgctgtcattgggtaccctcatgatatcaaaggagaagctgcatttgccttcattgtgctgaaagataacatcagtgatgagaacatggtagtgaatgaactcaaattgtcggtggccaccaagatcgccaagtatgctgtgcctgaccagatcctggtggtgaagcgtctccccaaaaccagatctgggaaagtgatgaggagactactgaggaagatcatcaccagcaggggacaggatctaggggacaccactaccctggaggaccccagcgtcatcacagaaatcttgagtgccttccagaagtatgaagagcagcgggctgctaccaactgagaggtgtgcctctgtgttgttcagacaaggctgcacaggacccctggacgtcctcaggggaagcaacttcaaaagtggcttgtttcttccgaacacatgacccatctactgccctatttgaagctgaagcccctttttctttctcctggggctcagagggctgcttctggaggctgggggaaggcctttgtcatacatctggtttccagaatcaagtcataattggcactaagccagcacagggtgaccagaggtcttagctccaaaactgtcatgctttctccagatgtgtttagatacaaaacacaaattattttttttttgtactttttctatttggggagaatagcagaacatttgagtataatgtgaacatttagttacacacacacacacacacacacacacacacacacacaccgtgggaagaatctcccttcttacctccccaggggatgaagataacagaatgcgcttttttttaaaaattttattaccattcaatgtgcttaaagtccaaaccagacatgtttgtgcctctggcacataactctcctgctaatccaagtcaccatgtccaactcctgcgtctatttcatatttggttcatttggtttattttatgatcgaacaaactggacaattcttacattttgtatggtaggaattgcactcagggcctcctgcacactaggcaagcaagcgctctacctctgagctgcacaccacacctctaactcccaagaagacggagtgaatgtcctctcctttacttgtgaaatcatttgggttcgtttctctaagctgtgatctggaaggagtttctttccccaaggtgcctcatagtaggagatcatattgcttcaaacgtgtgaggttgttcatggtagccagtgaaaactcgggtgtctttactaagcctctggtcccatctgaactgagatcctgaagactctgcctgtcctttcttttgtggttggggcagcaagaactcactgtggtccaatgacgatgacacttggtgctcctgagcaaggtctcttttgatgtgccttaagttctctggacattggtgagtgatgcaaatagtgaagtcatgaaaagcttattttgcagctagattgtggctaagcatgggagggctgaaggggaggcagctctgtgagcagggcccctgggggcaaaggaagcctgttctgtctggtccacagaacttagctatatgggtgtttcagggtatcttagctactgcacacttactgtctgtcctgacgtcttgggtaatggggtaaacatgctgacgctcccaggaggcggagcggttgtagtatgaacaaatcttaatagtcctttgttacaatcagcagtgaagagccatgtgatggacgtggctgagtatagttactgtgccctttgaaatggcctaggtttctaggttactgatagaagctctcggaatgatttatagaaatatccaaataaagctttattttgttcactgtc

SEQ ID NO: 125 - DNA, 2541 bp, Mus musculus
ggcacagggatgaatacctattgaggaaaaccacaaggacttcaaccagatactaagggaaaaagagtttcgttccacagtcatcaggtcagtcactcctaacttcagtcaccttgtgtctgctgaaatggagactgtgcactctacatttctcctgctactcttcgtgcctctgacacagcaagcaccacagtcgcagctggactcacatgttaactatgagtatgcaacaggcaattctgaagaaaccaaatttagccaggattatgaagataaatacctggatgggaaaagtattaaggaaaaagaaactatgataattcctgatgagaaaagtcttcagttacaaaaagatgaagttataccatcattaccaaccaagaaagaaaatgatgaaatgcccacatgcctgttgtgtgtctgcttaagtggctctgtctactgtgaagaagttgacattgatgctgtaccaccattgccaaaggaatcagcttatctttatgcacgattcaacaaaattaaaaagctgactgccaaggattttgcagacatgccaaacctaagaagacttgattttacgggaaatttgatagaagacatagaagatgggactttttcaaaactttctctgttagaagaacttacacttgctgaaaaccaactactaagacttccagttcttcctccaaagcttactttacttaatgccaaacacaacaaaatcaagagtaaaggaattaaagcaaacacattcaaaaaactgaataaactctcttttctctatttggaccataacgacctggaatctgtgcctcctaatttaccagaaagtctacgtgtaattcaccttcagtttaacagcatatcttcacttacagatgatacattctgcaaggctaatgacactcgttacattcgggagcgaattgaagagattcgcctggagggcaatccaattgctctgggaaagcatccaaacagttttatctgcttaaaaagattacccatagggtcatacttctaaccccatcagtgcagcttataacctaaggtacatgtgcctaatgtctaaaggaacagaaacattagtttaacattaccgttttatctcactatgatggaagtttatgtttaaacaaagtgtccaaaattgttgtatgtgactacaaaaataatccagcctgaatctcttagttcaaaacaaaatactgtggaactaaacagcattaagggtctccttgttgttataccaaaccactatctaaatagcatgcttttacacagacacttgcttgagatacaccattcccatgactaatgaagtaagaaaattccaagaaacttgcaactgtttgtcttttttagcatttactgtatctcaaaagcatttaagacagaggttccagaacctgtgcaaagccaagtgctcccagtgaccttccactgactctgattcatcagcattctttgtaaagcagaaatgtactttctgtcaaggcagctacttcactgcatttctcacttagcccaaggaaagggacaacacacgcaagcaaacatttccagagaagggaaaattttactctttggtacagagccaatttagaaaagttcaattttctgctttgtggtcacatggatagcctttagtcaattacttaaaaaactttgttaaaaaaaaaaagtaaaaatcctacccatttctcaaaggataataaggttccttcaccttaaagattctcaaatatgaaataattgtaaactttttcacagtataggagtttattcaaatataggaaatgaaaacaaagtctacaccattgtgctgtgtgcagcttcacctgtatatgttcacccaaacaaactaaatatgctcattccagcccaagagcaccatttctcaatgaccatggtttccagatacatgtaatagtgaaaacccaatctcacaatgcagattaaagttccaaaactaagcttcagaggaaggtgcacagaccactcacaaatattactctacatattacttggagttgaacataaaatgatcagcgttttagaaatattcatcttttatacataaaagtaccaatatcatttctattataagttttacattagactctccatgttcttcccagaatattcattttaagtttggtggttttgttccaacccagattgacccctgtctcctctgttaagggtgatgaaacttttcattaaagcatctgtgaactgtaaggccacaactattgctctaataatgtcaactagctcattcatttttataagttaattacagtaactttatcccactgtattattttgtgtccatgactcattttctctgtgactgaacgctcaccaagagcactgaacacagttctatttttatgatacttaatagcatatttgagttaaatatacaataaacattgtgaaatctatccaagtagaagggttctgtttatatggaaaaaacaagttagtataatcttgaataaatcaacagaaataaagcgacaagattgagaatgg

SEQ ID NO: 126 - DNA, 4551 bp, Mus musculus
ggcggcgcgccttgtccctgacggcgatccgtagcgctgggagtcagcggcggaaacatggcggtcgtgtcggtcctagcgaaagtttctaccgaggccttgcggtgctagtgcgggaggcctcgggctcacgtccccacatcacctccgcgttctggctcggaggctccgcgccctttggctctgcgagcttcgcagcggaaagagcgaggctcgctggcgaccgctgactcgggtcattacaaagaaaacttctgagagaatgttggagtaggcattaccaacaccttggctttattgaatgaaatacaggaagttaatttttgtgcctcttgggaccctccagtgccagattacatgtgcagatcactgcgatactgtgttagtcattgtctctatctagcaatgactaggctggaagaagtaaatagagaagtgaacatgcattcctccgtgcggtacctcggctatctagccaggatcaacttacttgtggccatatgtttaggcctttatgtaagatgggaaaaaacagcaaattccttaattttggtgatttttatcctcggcctctttgttcttgggatcgccagcatactctactattacttttcaatggaagcagccagtttaagtctctccaatctctggtttggatttctgcttggccttctgtgttttcttgataattcatcctttaaaagtgatgtgaaagaagaaacaaccaaatatttgcttctgacatctatagttttaaggatattgtgtgctttggtggagagaatttctggatatgtccgccatcggcctactttactaaccacagtggagtttctggaacttgttgggtttgccatcgccagcacaactatgttggtggagaagtctctgagtgttattttgctggttatggctttggccatgctcattatcgacctgagaatgaagtcttttctagctattccaaacttaatcattttttcagtattgttatttttctcttcattggaaactccccaaaatccaattgcttttgcatgtttttttatttgcctggtaactgatccttttcttgacatttattttagtggactttcagtaactgagaggtggaaaccttttctgcatcgtgggagaatttgcaggagactttctgtgcttttcactgcaatgattgagcttacattcttcatcctttcagcatttaaacttagagacactcatctctggtattttgtgataccaggtttttccattttcggatttttctggatgatttgccatattatttttcttttaactctttggggatttcatactaagttgaatgactgccataaagtgtatatcaaccacagggcagataacaatagccttgacagaatcatggcatccaaagggatgcgtcatttttgcttaatttcagagcagttagttttttttagtcttcttgcaacggcaattttgggagcagtctcctggcagccaaccaatggaatcttcttgagcatgtttctcattgtcttgccgctggagtccatggctcatgggctcttccatgaacttggcaactgcttagggggaacctctgttggatacgctattgtgatccctaccaacttctgcagccctgatggccagccaacactgcttccgccagaacatgtacaggagttaaatttgaggtctactggcatgctcaatgccatccaaagattttttgcatatcatatgattgagacctatggatgtgactattccacaagtgggctgtcttttgatactctgcattccaaactgaaagctttccttgaacttcggacagtggatggacctagacatgatacatatgttttatattacagtggacacacccatggctcaggagagtgggccctcgcaggtggagacatacttcgccttgatacgcttttagaatggtggagagagaagaacggttccttctgttcccggcttatcatcatcttagacagcgagaattcaaccccatgggtgaaagaagtgagaaagattaatgaccagtatgttgcagttcagggagctgagctggcgaagacagtagatattgaagaagctgacccgccacagctgggtgactttactagagactgggtagaatacaactgtaactccacaaacaacatctgctggactgagaaggggcgcacagtgagggccgtgtatggcgtgtcaaagcgctggagcgactacacgctgcacctgccgacaggaagcgatgtggccaagcactggatgttacacttccctcgggttacgtatccgttagtgcacttggccaactggttatgtggcctgaacctcttttgggtctgcaaagcttgttttaggtgcttgaaaaggttaaaaatgagttggtttcttcctacagtgctggacacaggacaaggctttaaacttgtcaaatcttaatgtggacatcaaggaaggctattattgagagttcatgttaccatttatcagtaacttgccattttttgtatgctgtatttttatttgtggaaagtatcttgctacatttgtagctgttctcactttgtcttttcttaagtaattatgggatgtggaagatattgggaatatgcatgattttatactaaaagtatatggagggtcatgaaaatgctgaatgtaaatgtgtaagagatgttaaaagtaacagtgcactttcaaataactttccatttgtctccaatgaaaagaaacacagttgtctgtgctctggagtggccaatggacaattcctaatgccttattttctaggcacccgttagagaatgtagaccagacaagtgtgttttaagagaactaccagtttacttagtaggagattctttcatgtgtgtgattcatataggtttggccccaggactgtttgcagaagtataaatacttggagcaggaagagacctgctcataatgactgcaaaatgcccttttaccaccacacccagatgtcttggctatgacctttacagtacagcagaaaagccccaactgcctttgagatgaaagcattgttaatgtaggtaacaataagagcttacatgctacaaagtgttccttcatggttagtgagggactttgaaaatactggtaaatttaagagtccttctcagggtaattttgttttcttaatgagtagtatttccagctacaaattcctttcaagtaaattgccattcttttcaaaaagtacacacttacaaaaataaatgtatcagtttctcattgaccgattcttcctgtcttacgtatttatgaggagttagtactctgccatgaaagttgcttttcagtcctattgtaataacttttttctgctgaaggtcaaggatgggaacagatcattttgttgttgttgttgttatatacctgtattgtattatgtaaaaaagtattcattttggcagttttaggtaagcataatggtatggttgtaatttgtaaactttaattcagtgttttgttggagtaaagtaggcgctgatcaggatatctccttaagaggtaagtcacttcctgtccccttccaattatccttacattctagattttcatctttgaaagagggaggtataattaaagtggagattagactttgttaccatggtgacttctcaccgttgaagccatttttccatgcccagagagggaaggtaacggatgcatctaccattttctaccaatgacttgaaaactgacattttatttagaaagaagtcacaccatcagggaacttgtatactgttatctatgcagcattgctacagcctatttctatgttttgaatattgtactcttaatactttgaataatattttgtaaaaaattaatttttcatttaatgtgaaattaagagttcctgaatattttactgtattaaaagtggaagttatacaaaatgcctttgcttttagagtttatgtttggtggcatgttgatttgaaaatatttccttattccagaatactgaagaattgatacaatattgaaagttagtggcatcctatatacaatattttttttaaaaaatgaatcttgttttacaactagaaatacagatagtaaatttcactgaataaatcattcatttgtgtgcatcttgaatttcagatgggtgccatttcacatcagttttgtataatttttaggttcttcaggtccacaattaaataaggaaactagcgttgagatgttaccttgctgtgcacatatctgtgtatcaggagctaggctcccctacctaagtggaaaggcattgctctctctagctctaatcctacaattcctttcttcctttccatatgaaacaactctatacacagccatgggtattgtctatgatctaattattctaagtatttttctgtgattgattttattacaccttcccaaatgctcttaataatttaacatagaaatttgtattttataaattatgaaactaaggcagtggactcttacaaaaatgacagaataataaactgctctgaagctaatttgagactc

SEQ ID NO: 127 - DNA, 2258 bp, Mus musculus
gacagcccaacttggacgccaggtccggccgacgccgccatgagcgccgcgcttttcagcctggacagcccggtgcgcggcacaccctggcccacagaacccgcggccttctacgagccaggcagggtggacaagcccggccgagggcccgagccaggggatctgggggagctgggctccacgactcctgccatgtacgacgacgagagcgccatcgacttcagcgcctacattgactccatggccgccgtgcccaccctagagctgtgccacgacgaactcttcgccgacctcttcaacagcaaccacaaagcggccggcgcgggcggcctggagctgctgcagggcggccctacgcgacccccgggtgtggggtctgtcgctagggggccgctcaagcgcgaacccgactggggcgacggcgacgcgccgggctccctgctgccggcgcaagtggcggtgtgcgcgcagacagtggtgagcttggcggccgcggctcagcccactccacccacttcgccggagcctcctcgaggcagcccggggccgagcctcgcgcccggcacagtccgagaaaagggcgcgggcaagaggggtccggaccgcggcagcccggagtaccggcagcggcgcgagcgcaacaacatcgctgtgcgcaagagccgcgacaaggccaagcgccgcaaccaggagatgcagcagaagctggtggagttgtcggccgagaacgagaagctgcatcagcgcgtggagcagctcacccgggacctggctggcctccggcagttcttcaaaaaactggcccagcccgcctttctgccgcccaccggcgccgactgccggtaacgcgcggcgtgggcctttgagactctgaacgacctatacctcagaccccgacagcggggagcagacgccgcccgaatcgctagtttctttgggacctgcgagcgacaggaagctgcagcttgggcactggactgcgagagaagctatattaatctttccccttaaattattttttataatggtagcattttctacgtcttattaccattgcagctaaggtacatttgtagaaaagacatttccgacagacttttgtagataagaggaagagactgcgcatgctttttatattcatttttacagtatttgtaagaataaagaagcatttaaatcgctgcagcttcctatgttcattctctcccgcacacaacatactgagacttcaccagggaaaagcaagcacctgggagccacccgaccaggtgcgttgcccacacggggtaaggagatggacgcgtttcctcgcggtctctattgcccgcggaaggaacacgggaaagcatgactaattcatgtgtgtgatcccagagtaggctgacctggggcggagaacagttggcctaacttttaggtggttgccgaagggtgagggggtggaagagagctgggagtctgaaacttgattcctcgttgcctctactttcctcaatctagggacaacgtgtagatttaaaaatgtgtaccagtacaaattaatatcctagtatataaaaagggcagccccaaaagccagtaattgtaatgtttgcgggcttaaccccccccccccaaagctatgtgcctttctactaagatactggttgttccaaccccttccctgatctgcacggcctgttgtacagaaaacacaaaccctccagggtctaaatacatagctttgtttgtaattcaaatccctgcccaaagtgcaggcttgtggactgctgtgagtctgtgatctttgccctctgcagttcttcagggtctctgacaggtgggcagtggagtaaggtacagaaatttctcttttatacagctctcctcacacccaacattgtatgggtgacagtgccacctctggcagctcccagaacactaaaaccacaaagtgtttaggttggacatttatttattgtaacagaacagtaatatttcaatatgagatactggctgaagctttacagaacaatctagcagagaatattagatactgcaaagaaaaaacatatataatattgataaattgtaactactttaaagctacaacaaagcacatttcctaagcccaagtagctgcaaaatgaagacacagaagacatgagaaacactcaaagaaacatgttatcaaacttgtaggaaggtaaagtttaaaaaaatgtgtattagaggtatcttgatttttaatttaaaactatcctattaatctctttacc

SEQ ID NO: 128 - DNA, 3082 bp, Mus musculus
gggagcggagaactgcaaggagcaggcggggagccgccccctcccgaggctagactgtccggggtcacagcctcgcccggcccctccctccgccctgaactgagacttccgggccggggcggaccctggcattaaggactgagtcctgctgcagacatggcgctgctgggccgtgcgttctttgctggggtgtcccgcctcccctgcgatccgggtcctcagaggtttttcagctttggaacaaaaacactgtatcaaagcaaagatgctccacagtctaaattcttccagcccgttttaaagcctatgctaccacctgatgcttttcaaggaaaagtggctttcattactggaggagggactggccttggcaaggcaatgacaactttcttgtctaccctgggtgcccagtgtgtgatagccagcagaaatattgatgttttgaaagcgactgcagaagagatttcttctaaaactggaaacaaggttcatgcgattcggtgtgatgttcgagatcctgatatggtacataacacagtgctggaactgatcaaagttgcagggcatccggatgtggtgataaacaacgcggcagggaacttcatttcccccagtgagagactgactcccaatggctggaagaccataactgacatagttctcaatggcacagcctatgtgacactagaaattggaaagcagctaattaaagcacagaaaggagctgcgtttcttgccatcactaccatctatgctgagagtggatcaggctttgtaatgccaagttcttcagccaaatcaggcgtggaagccatgaataagtcacttgcagctgaatggggtagatatggaatgcgtttcaacataattcagccaggacctatcaaaaccaaaggagcctttagccgtttggacccgactggaagatttgagaaggagatgattgacagaatcccctgtggtcgtctgggaactatggaggaacttgcaaatctggccactttcctatgcagtgattatgcctcttggattaatggagcagtcattagatttgacggtggagaggaagtatttctgtcaggtgaattcaactctctaaagaaggtcaccaaggaggagtgggatataatcgaagggctcatcaggaagacaaaaggctcctaagatgaccacaacttcatctgtgaaacactaaagttagggactagagtgctacagatggaccgtggtcttccacttgtcttgggggttaataaattgtttgcttgatgatttctgtagttctgaggatcaaacccagagtgtctgctctgctcattttctatctctgagttgcacctcagccctaaaaaatggtcgatgtttgccacgtgcaaacagtgtgccaggtcaggggtggccactctgtattgaagggtaaattggacaggatatcttttctttaaaacacgtgaaaaacaaaaaggggcaaagatttttttttttctttttcaaattattcttgtgttgtttcgcagtagataaaggtgaaagatgcttgttgctaagccagttgaactgagttcaatctcaaggccctgctctgtagggtagaaccaactcttcaaagtgcctgctacacatgcataccccaccccagcacatgtgtacgtgtgtgtgtgtgtgtgtgtgtgtgtacataatgtacacacaacctcgaccatgtatataaatggctcgattgttttacactctctcattgttctcctttataccctttcctctcccatggaaccctttcttctccctatcagtcttcttgtactttcagggttgcttccattggcttgggtgtgaggtcttttccttcaggacgggggctgaggcctatgacgcccttcccacagcagccattctccacctgtagtgcctctggttggtgtgttgaaaaagctttgatagtactgaaatatgtgtggaaaggtggaaaatggaaacaggagtaggcttctgtgatctggtgaaatagaagaagcttaggagtggaggtaacctgtgagggacacatcacaccgtgcctatggcatggggcctagaaatgagaggcgctatattgagtctcagtatattctgttttcatttagacttgtgaattatcttctttgtagctctgtattaattcagccttagtgtgttaggagattgtatatcatagcagatgctttattgaatacagaataactgatagtacttggctcttgatactagctaatggaaatttcagagttctaaaataattgtattgaagacattgggataagtattacatgggatttagatgttgggaaaggggtaatttacattgctttcaaagttaacaaatatagtaatatgagatagcagtcaaggatttctgtaagtagagactcatgaaggctataaaatatttttgtatcttactaatatatattttttatttggactataatcttgcacttttgagaaccaaataagaaagccacagtcttaagcctccagagttagaattgagcctgtgcttttagaaagtccatttggctttcagagcaacctcttacagcatgttcactacactgaccgccaccattgtcctctgtgctataacaggaagcagtttttattacctcatgaatagatctatgcaagaatgtagagtttctgtttgttatgtgtaagacctgtatggtaactgtacattgacagttaattgtgtcataaatgatgtttgttgttcagtaaacacaaccacagtgccatcgtttgggtttggaacaaggcctttgagagtcactcttgtccactggactgttctaagatgcttttcccgcacatccttagtgccaacaactaccccacggctttgcttccttcccctcatccccatctgctgctttaaacgtgtcaatacatcttcgacattaaaaacttttcggcagttgtaaaaaaaaaaaaaaaaaaaaaaaaaaaaaaaaaaaaaaaaaaaaaaaaaaaaaaaaaaaaaaaaaaaaaaaaaaaaaaaaaaaaaaaaaaaaaaaaaaaaaaaaaaaaaaaaaaaaaaaaaaaa

SEQ ID NO: 129 - DNA, 4755 bp, Mus musculus
cggcacgaggtgctttaaggaacagaatgctgaagaagctatggcaggtgattggagttgtgcttcatacatttcagcagttcagcagtgttttatctgccaactaagctttttacttgagtgcaccatggaaacgctactaatgagacttgttgagcacaaaagtggacttgaagagctagaagccactgttttcaaatgaaggattccaaacagttttaagcctcagtgcttttaaatcaccactgagattccccctcatccctgcccctaaaatcaaaatggcaagcagacgaaaatcaacaacaccttgcatggtccttgccagtgagcaggatccagatcttgagctgatatcggatttggatgaaggccctcccatccttacacctgtagagaatgctaaagcagagagtgtctccagcgatgaagaagttcacggatctgtggattctgacaatcagcaaaataagaaagtggaagggggctatgaatgtaaatattgtacttttcaaactccagatctaaatatgtttactttccatgtagattcagaacatcccaatgttgtgctgaattcctcctatgtttgtgttgaatgcaattttcttaccaaaaggtatgatgcactttctgagcataatctgaaataccacccaggagaagaaaatttcaagctgactatggtgaagcggaataaccagacaatctttgaacagacaataaatgatctaacttttgatggcagttttgttaaagaggagaatacagaacaaggagaatccatagatgtttcttcttcgggaatctccattagtaaaactcccatcatgaaaatgatgaaaaataaggtagagaacaaacggattacagtccaccataactcagctgagggcacttctgaagagaaagagaatggagtaaaagcaagccaggaagaaaatgcagaaagtgtgagttcttcagctttagaatccaatacaagtacttccaccatcaacagagtgcatcccagtcctgccagcacagtggtgactcccacagctgttcttcctgggttagcacaggtgataactgcggtgtctgctcaacagaactcaaacttgctccctaaagtcttaatccccgttaatagcattcctacctacaatgctgcattggataacaatcctcttctacttaatacctacaacaaattcccttatcctacaatgtcagaaattacagttctttctgctcaagcaaaatatacagaggaacaaatcaagatctggttttcagcccaacgtttaaagcatggtgttagttggactcctgaagaagtagaggaggcgagaagaaaacaattcaatggaacagtacatactgtacctcagaccataactgttattcctacacacatttccacagggagtaacgggttaccatctatcttacagacatgccaaattgttggtcagccaggtctggtccttactcaagtagctggaacaaacaccttgccagtaacagcacccattgccctgacagtggcaggggttccaaatcaaacaaatgtacaaaagagccaagtgcctgctgctcagcctgctacagacacaaaaccagccacagcagcagttccatcctcgccaagtgtcagacctgaagctgcactagtgaacccagattcatttggtattcgggccaaaaagactaaagagcagctggcagaactgaaagttagctacctaaaaaatcagtttccccatgactcagagatcatcaggcttatgaaaataacaggccttaccaaaggcgagattaaaaaatggtttagtgatacaaggtacaaccagagaaattcaaagagtaaccagtgcttacatctcaacaatgactcctctgccactatcatcatagactccagtgatgaaaccccagaacccccagcggcagctgcttcacagcagaaacagtcctggaatccctttcctgactttgctccccagaagtttaaagagaaaactgcagagcaactccgtgcccttcaggcaagttttctcaacagttctgtacttactgatgaagaagtaaataggttaagagcgcaaaccaaacttactagaagagaaattgatgcttggtttacagagaaaaataaaacaaaagctttaaaggatgagaaaatagaagtagatgaaagtaatgtaggtagttccaaagaagagcctggagaaagttctcctggagatgaaacagttgcacctaagtcaggagggacaggcaagatatgtaagaaaacaccagagcagctgcacatgcttaaaagtgcatttgtccgaacacagtggccatcagcagaagagtatgacaagctggctgaagagagtggccttgccagaacagatatagttagttggtttggggatacccgttatgcttggaagaatggaaacttgaaatggtattactactatcaaagctccaattcaagtagtttgaatggtctatcttcccttaggagaagagggagaggcagacccaaaggaaggggcaggggcagaccacgtggtcggcccagaggtggaaaaagaatgaacacctgggacagggtaccatcgcttataaagtttaaaactggaacagcaatacttaaggattattacctgaagcacaaatttcttaatgagcaagaccttgatgaacttgtcaacagatcacacatgggttatgagcaggtcagagagtggtttgcagaaagacagagaagatctgagttaggtatagaattatttgaggaaaatgaggaggaagatgaagttgttgatgatcaggaagaagatgaagaagaaacagatgatagtgacacttgggaacccccacgacatgtgaagcggaagctttctaaatcggatgactgaaatctacttaaaattctgaaggagaataagttcttcaactcaagatctctgaattactgtgaatgggcccaactaatcctgatgacactgaaaatgctttggggcatacatactctcaaaacagaatccaatgtccaaaagaaatggaacttgatgttgtgccaaagtcaaactgctgcagtcgggggaagttccgcaatgtatatagagcgctaattaaaacacacctgtaaaaaatgaaattttaatacagtccatttttattctgacaggatggaaaccttgtgaatctttgactttctaaggggttaatgaccactagagcttgtcctcacatctagtccagcttactgctgtgtaagatgggctgtattacctgtattctttgacgtgattaagcttacagctttgagtgaccaaacattttacagagtaaaagttgttagaaatgaaagaggagaaccaaaccctactttacttctgtgtcttatttatcaggtcctacaccaaaattccacagtttgcagtgtgcctgtgcctgttatgttaggacaggaagacctgtggtcttgctggccttcatgactagaccctccactgaacactgtctccatttgtagcactgtgtgactcctctgtcagatccgacttgctttttactaaactgaagatactaccccaaagggagaaagaacttagcagagagactcttaatactgttccaagtgtaaaacagtccacagtaaaatacatgtggtgcgctttctcacgggcgccagacaggctcagggcagagtttgcaggaatacttttcatgaaattctaccttgtagtaacaatttcagtgaacagagaaaaagaattcggaacctaacatgttaaaaattaccttttcgtgtaagaatcggggctttttaacggtaagtatgtcgcagcagaagacagagttcctactgacttgtcactagcctggtgctgatgtcgtgttgggaaggaccctttctgttgtgatcataggaccacttttcaatctgtgctttcctcacaggacaaattgtcagttttattagatttggacttaaaaatttttttttggatggtcacacatagtgggtttggccagttcatgttttgtctaacttaatgaatactaaatactaagctcttggttaaatgtttgtcagctaatgagaaatgttatgataaagccttgactatgcatgctgctttcattttgataaactttttattttttaactatagctttattagcaattcccaaatgctgcaatttgctgatttcttcacacagacagctggctttgtgggtggctttttcatactactgttaactttttttaaaaaaagaagtgatgtaaagactgtaacaattgaatgcactaagctgtttttcttttacacatttaaaaacttcttaaagtactctgtattataatgattaaattgctccctttttaaaaccattgctaatgtggtctgagttttatttgacagtaattttaatgctctcaagattcaatccttgagatgtcaaggattggagatgaaggatttgaatatatttacattacgattcctttgtgctatgctaactttgtatagctgcaaataactttgtgatttttccatctcactggtaggctggatgaaagtctgctctgatgtttgctagcttttaaatacatttattcgacagtgcaaaagagcttttctttcctggttgactatgtctttgaatacaaaataaaagttagcaataacaaaaaaaaaaaaaaaaaaaaaaaaaaaaaaaaaaaaaaaaaaaaaaaaaaaaaaaaaaaaaaaaaaaaaa

SEQ ID NO: 130 - DNA, 5032 bp, Mus musculus
attctgactcctggacaccggtggctgcaagctgcgattttaggcgtcctctcattttctatccttatctccgcccgcggctgccctggccagccagttttttgatttttatcttggtcattgatcaatataacgaacctaaggatatcaggacattaataccccactgccagctctggcccagagcttgtacgcgcagcgggctgcagaaacttagtcatagcaccctttgtcgctgaggtctgaagctcgctgcacgttctcatccctgggaacgtgaccccagcatccgacgccaagatgccggcccacatactgcaagagatctctggcgcttactcagccaccaccacaatcacagcgccaccttctgggggacagcagaatggaggcgagaagtttgaaaagagttctcaccactggggagcagatgttcgccctgaactaaaagatgatctatatgaccccacctatcaggatgatgaggggcccccgcccaagctggagtacgtctggaggaacatcattctcatggccctgctgcatttgggagccttgtacgggatcacactggttccctcctgcaagctctacacctgtctcttcgcgtatttgtactatgtaatcagcgccctgggcatcacagccggggctcatcgcctgtggagccacagaacatacaaggcacggctgcccctgaggctcttcctcatcattgccaacaccatggcgttccagaatgacgtgtatgaatgggcccgagatcaccgcgcccaccacaagttctcagaaacacacgccgaccctcacaattcccgccgtggcttctttttctctcacgtgggttggctgcttgtgcgcaaacacccggctgtcaaagagaagggcggaaaactggacatgtctgacctgaaagccgagaagctggtgatgttccagaggaggtactacaagcccgacctcctgctgatgtgcttcgtcctgcccacgctggtgccctggtactgctggggcgagacttttgtaaacagcctgtgcgttagcaccttcttgcgatacgccgtggtgctcaacgccacctggctggtgaacagtgccgcccacctctacggatatcgcccctacgacaagaacattagctctcgggagaacatcttggtttccatgggagctgtgggcgagcgcttccacaactaccaccacgccttcccctacgactactctgccagtgagtaccgctggcacatcaacttcaccacgttcttcatcgattgcatggctctcctgggcctggcttacgaccggaagagagtgtccagggctgctgtcttggccaggattaagagaactggagacggaagctgcaagagcggctgagtgtggggtcttgcagttcctgttccagaagccagcttggcagaggcttactgttctgttaattaactactgagtattgccacccagatgctaaaatgatgactgacgttaacccattctggtacagtattgtaaaacggacaaaaatcggaagtcgacagctcttccttctatgctaagctcatcttcccttctagtttcttttcccgttgtctttttctttgctttgtccctgatgacctcgtttctcattgcttctcccaagccagccgccgctcagctataggtcagtgttcaccttccagagtacaccaacttctcaagggtctacagtaaaggttcgtgccccacccccaactcttcttaagctgctctgagttagaaatacaagaaaaatcttgagagatttctcctgttatttttagcccaggctttgccagatggaatgaaaaagaaaatagtttttatttggcagggagcctataaaagaggtaaatcttaaggggccaagttcaacacgcaggctatgattcatcaaagccgtgggagagggggatctcttatgaacaggctcagctccgtctggcagagctaccgcagcctttcaacatagcgcgcctcctctcctaattcttgtaggtggcaactgaggaacttcgtgacactaaaatacagtaactcatcagtatctcagtgtagtttaggctgaagatttaaaaaatatatatatatatatatactagtaaagtgaaaaacaatttgtagaaaagtggtctttaataaggattttcttttcctttaatgacaaggacccggggccaggtgtggtggcttgcatcttaaattgcaggactggagaggcagaggcaggtggatctctgagttcaaagccagccagggctagatagtgagaccttgtctcaaattaaaaaaaacaacagttagcaggacatgcagagcaagggaccctcgagtgaggcatgtttggaatccgtagggcagtcgctcatggtttcgagcgtcccgtgagctgcaccccagggtcctttttaattcctgttcttccatctttaagatgatggtcgtgcccacaaattgaggatagctgtggcgtttccatacatctaacagtggaaggatttcaagagttgaacttgagtcacagttaaaactgaaaagtcgtaaagtctgtccaggatccttacaaaactccgtgagtgcttccctcagaagacgatctgcgcgccttctccctcccactgtcgggcagtggacgggcacgttggaagtcgctgtgggcgcctcctaatgacttctcaaaggaaagcttctgagggccccttaccaggggacttcacggctttggggtgttctagtggagcaggttaggttttttttagcccctttccagtcccgctgctgtttgtggcaaggcagtactgactcatgcctcactagctctgtgaccaggtaggactctccctgggatacatggttgaaatctctcagctctaccacacctgcctcttttcccctacccattttttgtgttttggggtgggtttttttgttgtatttcttttttcctctttgacatttagtcttggtctaggcagaaatgtcctggatatttccaggcagtaaagatgtgtggtcctggcaccttcctcactcagagatacaacctctatctgcagtaggtagagacggctatccttttctggtgggtttcagattctccacctcttatccctcccaggcttctgacactctcttcagctctaaagaaaaagtttggccaactttctagaaacatccctggctcagagagactctttgtcagtcattccaaaacaaatggtttggtggcacacatgccggcgagtcagggcggacagagcatgcaccgtgctcccggcacttggcaaagcttcggcaaagcttcgcggctaatcagcctcctgggtgatgctgtggttaagtgggaagctctgcactcgaggttgtgttcttaagtgcctctgtttgaaagctttgggtagggtaggagagctgagatgccatgaatttcacagaaaggctctcgtgcagcagtgcagaagcctggccgctcggctgtacagcataccaggtgctgtgcttcgaggggacagtcttcctgggctagttgaatagagagaggctttagggccttcctgtgcccacttgaaagtagccttacccttcagctgtttgctaaaagagaattcttgggcgaatccaaggtatttgctgagctgtggccctattctattccttggatatgccttttgagtgatttcagttccgctggttatggtgcccacttaaacaaatgtgaaaaataaaagcagctctcttcttagcctgccccgtggatctgaaccatgctgtggctaaggaccccgtaaaataacatctgtcgttaagggtgtaccagctcactaagaaacactgctatcaagatttttaaagctcaaaccaagtgacacttttaataagagactaagatctgattgagggagttttctaacagtccttgcctcgtggacacgctaaagtttgacttgggtgccttacctcttttctaaccagtgttgctcgtgagcctgtggcgctcgcttgctcgctcgctcgctcgctccgtggattccttaaaaccagagagcctgtaagtgtggcaagatcaaaactgggcctggctggagggttagctggacatggatctgcaggattgcctctggggacctcgttttgggaacttttcttggggctgttttgctcaagtgcccgtagctgatggatgggtgaagtaattttgaacgtacgcgatttgtaggttttgttatttgttttaagatttaaaagctggttataggattttaagtgaaagcttttcttcctggtttgctagtgttcttgagtgtcttctttagttgaaataggttagtaggaaatttaagaaagtggtggccgtgttacactggtggtgaaggccagggccgcctaccaactctcagttttttgtaacagtcccactctgacgataatgagttcactccttggataaggatgttaatgagggaagagccttcccgacctgacctaatcagctcttactggacccagctgtcaacactgttgcattggggatttaagtttccaacccatgacttatgggacagattcaaaccgtagcactgggcatttcgcctaacaatactgtgactcagtattctgtgaaactgggataatattcctgacctacctccacgggtaggtgtgagcatgagaaaatgctctttataaaacatttggggatcctctgcagaggagtatttaagtcctgcacatttttgtagtaactgtccatcgtggacttgacatgtgcctatgtcccagatgacgttgttaatctacatcattctcagaggttgaatggatgcgtcagataatgtatactcactgctatgaaaacatgcaggactccgtttccttccttgggtgggatttttcctttattatgtgcaactgtagttatttgtaatctaataattttcattaataccaactccgaaagtatttctactcatctgaggttgtgtttgttcataataaaatgaaatgatctgactgc

SEQ ID NO: 131 - DNA, 1684 bp, Mus musculus
gcggtcacctaccggcgcccggctcctccgacccacccggccacactatgacagatcaggcttttgtgacgctgaccacaaacgatgcctatgccaaaggtgcgctggtcctgggctcatctttgaaacagcacaggactactaggaggatggttgtactcaccagcccacaggtttcagactccatgagaaaagttttagagactgtctttgatgacgtcatcatggtagatgtcttggacagtggtgattctgctcatctaaccttaatgaagagacctgagttgggcatcacattgactaaactccactgctggtcacttactcagtattccaaatgtgtgttcatggatgcagatactctggtcctctcaaatattgatgatctgtttgaaagagaagaattatcagcagcaccagacccagggtggcctgactgtttcaattctggagtctttgtctatcaaccctccattgaaacgtataaccagctgttgcatctggcttctgagcaaggtagttttgatggtggggaccagggcctactgaatacatattttagtggctgggcaacgacagatatcacaaaacacctgccatttgtgtataacctaagcagcatttcaatatactcctacctcccggcatttaaagcgtttggtaaaaatgccaaagttgtgcacttcctgggacgaaccaagccatggaattacacttataacccccaaacaaaaagtgtcaactgtgactcccaggacccaaccgtgagtcacccagagtttctgaacctgtggtgggacaccttcaccaccaacgtcttacccctgctccaacaccatggccttgtcaaagatgccagctcctatctaatgatggaacatgtctcaggagccttgtcagacctgtcctttggggaggccccagctgcaccacaaccttctatgtcctcagaagaaaggaaggaacggtgggaacagggccaggccgattacatgggagcagattcttttgataacatcaagagaaaacttgacacttacctgcaatagaagcactgccattttcctgtggacacacccatgtcttaggcacgtttccatacatagtatgtgaagtctgttacagttgttagaggctttcactaaacctcatcagatgaggggtttgggcaggacaacaggtgagaactgggcaaatgttattaggtcgtaattccatcatgtggacaagtgttctgtttaaccctagacttttttttttaaattctcaattcttaaattgcccaatgtgtgataaagaaagccaaccattaagctactaagatggctctctcaagtggtggcaaaacttgactctccatcttcaaaaacaaggtgtgacattttccaatcttcacttgttgcatccttcacaagacctgcaatgtagaactgttcaaagcctgtcagagaagtagccttccagactaaagtggcctttattaacactgcggagtgattcctaagcctaccagctagtgttagttcaccagttttctatgcaccgtgaaggcagcatgcagacttgttctttctcagttgtctacttgaaaattgcagtgtgctctctgatggtagctgtggtagcactgtgtataacaaataaacacttattgacataaaaaaaaaaaaaaaaaaaaaaaaaa

SEQ ID NO: 132 - DNA, 6707 bp, Mus musculus
atgcagctgcagaagcatctcctgcaggaggacctaattgaggactgcttgggagagcaaggattgctggtgcaagtaatgtcagccaatcaggaactgctatttaaaagagatactttcttgggaccaatgggggtgtgggtggagggcattaaaggagattgcaacagtgctcagatgagcttgctgcagcatttcttacctgttcccagagtttgtgtcaacgtagaccaggatctgtcacggaaagaatgtgggttatggatgaaagcagacttcgacctgagtcttggcatctctgctttggctgggaaactggtgggagtagctttttgcatggaagactttgttatcttcacgggatttgtgagcaggaaggatgaatttggcttgcagcagacaagcaggtggcctctcctccagctccgtgaccataaaaagctgccttatttgagtctggaagaagaacagaaggttgttctggaagacaggcaacccttgggctcaagaccaggagtggggtgccagccgccaggcacctcggaaacgaacagaggtcacggagagccggtgtgcccggggcgaggtcccttgcggctgtgggacttgagactggcagacgacactgtcctctcactcccagccagtgcagactccttggtgacccccgtcccccgcgcccagagaccaccagggatcttgcagcggcccgggtgtccctctccccgcccctgcgtctgtccgggcggtggcgacacggcccggctggagggggcgctcgtgcgcaggagcggcgcagcaggtgccgcggttacctccacctcggcggggggagagggggcgggccggggcgggaggcggaggccggctcgcggcggcccgcactcgagctgctgcgcggcgacagccgccccgagcctcctgttgctggactacgatggctccgtgctgcccttcctcgggggcctgggcggcggctaccagaagaccctggtggtgctcacctggatcccggcactgttcattggcttcagccagttctcggactccttccttctggaccagcccgatttctggtgccgcggggccggcaaaggcaccgagctggcgggtgccactgtcaccggccgatggggtgacatgggcaattggaccagcccctcggccacccccttctccactgcctcctgggggaccacgagcaaccgaagcaacagcagcgacacaccacccctcccatcccctccaggcaaggggaacaacgactcaaattgcgactgccacgcgtgggactacggcatccgcactggtctcatccaaaacgtggtcagcaagaaagtctggcttctgctgatagtagtgtggatgagtatttcctggccacacccagcagatgcctatgctgtggagagtcagctctgtgacccgggctcctctgctgtacagccagccttctccttcagcaactactgctttcaattcatttcaatcactgcttcatcttgcctcctccagggggttaggaagctgtctgttcttcgagtgcttgacgtgctcagtccatgcaatgatcctcttggccagagtcttgcccttaacttgcctgtttacaacgatgcccatggcctgctgcgtgacactggagattctatcaactttgctgtggtaacggttatggggcattcctttacgaacagtgcctgttcccttgatgtctacaatatcaaccttcttgtagattcacatgcatgtggccagatgaacatcaatgagaacaaatttgagagcctgggaatggcgaagcttcctcatacttctgaaattctttggtggattctttacaagataacaatgtacatagataatctgtttagattaaagaaccacattgccttttgtggacaagttcccattggattttcagcagcccacgatgatattcttcgtggcacatgtgatatgtctccaaatgacagtgccaagaccctttgggatcttgtgtgtgataatacctggaaagtccatatcgctaagttctccttactggttggattaatctttggctacctaataactggatgcattgctgactgggttggccggcggcctgtgctgctgttttccaccatcttcatcctcatctttggactgactgtggcactgtcagtgaatgtgacaatgttcagcacactcaggttctttgaaggattttgcctggctggaatcatcctcaccttgtatgcattacgaatagagctatgccctccaggaaaacggttcataattaccatggtggcgagcttcgtggccatggcgggccagttcctcatgccggggctggctgcgctgtgccgggactggcaggtgttgcaggccctcatcatctgtcccttcctgctcatgctgctctactggtcgattttccctgagtctctccgatggctaatggctacccagcaatttgaatcagcaaagaagttgatcctgtaccttactcagaagaactgtgtgagccctgagagtgatatcaagggagtgatgccagagctcgagaaagagctttcacggaggcccaagaaggtgtgcatcgtgaaggtggtggggacgaggaacctgtggaaaaacattgtggttctctgtgtgaactcgctgacagggtacgggatccaccactgctttgcaagaagcatgatgggccatgaagtgaaggtgccgctcctggagaacttctacgctgactactacaccatggccagcatcgcactggcctcctgcctagccatgtgtctggtagtcaagttcctcgggcgcaggggagggctgctgctcttcatgatcctcactgccctggcctcacttctacagctcgggcttctcaacttgatcggcaaatacagccagcatccagactcagggatgagtgacagcgtcaaggacaagttctccattgcgttttccatcgtgggaatgtttgcatcccatgcggtggggagcctcagtgtcttcttctgtgcagagatcactcccacagtgataaggtgtggtgggctcgggctggtgctggccagtgcaggttttggcatgctgacagcgcccattattgagctgcacaaccaaaaaggctacttcctgcaccatatcatcttcgcctgctgcacgctcatctgcatcatttgcatcctcctgcttcctgagagcaggaaccagaacctgcctgagaatatcgccaacggggaacactacacacggcaaccgctgctgccacacaagaagggagagcagcccttgctgctcaccaacgcggagctcaaggactactcgggcctgcatgacgtggctgcagtgggtgacgggctgccagagggggccactgccaatggcatgaagactatgtagctcgctggaccacgccaccattccaccagtccccccggggcttgaagggctggggagagtttgcacacaggtttacagaccagggaggaagtccatctctgctgctgactccactcaattgtgagactttcaaccggtgtggggaattctgtctttccagacatccgaggaacacatctgagaaaccagatgctctggaaataaccctctgaagactttcttttctgccattcaatgtttgtatttattttggtcatttttacgagaagcactttatccccttcccccctccactgatcatgaagcagaacctccttcaggagtgagggtcactctgaggaagtccctgtaagtgaccaatgcagtggccagtcccctccctggaggccagactcaatttccttctccactcaaggagacagaggtcatctgtaggccaggacccctacctccaggctccctgccatggacagctgtgcctctcaagcagagagtccttgggactacattttacacagaggaaaatgtacatgaattgttgtttttctttttttcttttcctagagtctgtatattttaaagttgggtactttactttctgtttgttaggtagtttccatgctgtgttgggaaaacagcctccagatgtcatacgagccagcttaatctttctttccttcaggatcatccttttgtacttgatctggaagtttttgtggggaaacttccatacttcaccagaaatcctacatgatgagaaagcgccagttcccgccgccgcccggtttgcttagttaagtccacagcagctgttgtgttgaggtgggagccatgtttgtttctgctaagacactttccttgactgagctccagcagcaaaggtccctcttccccagccagccctgttgccagtactacttgaaaatgtggccacttccagaactccaaacaaaaggaaaataacagaaaaaggcaaatcccaggagggagtctcgatgtcccacacatggccgccactcacgtctccagcacataccatagagagctccagcttggatggctgccactctgacatcacaacagtgcccacagcacctggaggcggtccacctcatgtcttcctcaatggcttcctgcctgtcactcactcagcacaaaagggccctgggcaggagtgcaggttgctcacaggtcagtccacgtggcctctagtcccttgaaagcagcaagaagtgagagaaagcaataactcaccaaagctcaactcccatcctgtaccagcctcccaggatgtcctttatctgtgtccctcatcttgccccagacagcagggcaccagggctgctaagaaaccagcctctggacctcttgcagcagctcaggcaccagcttctctgggcatcgtggcttcttatcaaccatctgccttgcctcttgccatgcgtctctcccacgtgctcttccagggaaatcatggccttgggcctatgtaggcaacaaagtgacttctaaatgacagttgctagaattcaaaggccagaaaaagggttgagttgagccccttccagctccttgtctgatctgtttcttacagtcttacccacttctcttccacatctgatagagacatcagtggaatccagccgccttgatcaagccctcttgagagtactgattccatatgcaaccctgtttctggcagctggcctatgttctctttgatgcctggggtcctgagtgctttgcttgaggaccaacatgtctaggagggcggccatgtggccagtccttgatacctgttttaagtccagcttcccttcactctccctggtctctcagtcatccctcttccatgccttgaggttagtacacattctctttccaaagcctctgtgatctgtgcagcctttgcgtgccaaacttgtaagataccattcacctttcccaggtacctgctaccaagtcacctggcagcaaccttctgttaaggacagaatgggacatttgcagtcatgagcaggcttacactggttgtgttggcctgcagaaatcactaggttagtggtgtcaaggtatagcacttcgaaacttcttttcaaggtctccaatctccacctcaaatgacagtggtaagaacactaggccaatgcagacagtgttaatggctgcagcgaccagaggcaacccatcagggattagcaaagaagctgccactgaggcaggggccagaggaccatcaaccagaaggcagactgctggcagtgtcttatgccagcctcagggaaagactaagcagctcagtttctgcttcagtgcatggacacctgaagttgctagaacaccttcatgaaagatagccaaaacaggaaagcttgcttgtgagccagcttgctgtgtggtctgaccaagtgagaaagacagcaggcacccaggcctcagacactctgacctagctccagaaagatggccacagcccagctccctggtaccaagctgtcatccctaaacttggccctttgtcccttgtgggcagatgctcctcaagcactggcctttgtgtggggcccctccctccctggagaacgttaaaaggtcttactctccacccatccctacacctgttttcataagttatgcacaaatgtcaacagctgagacggggtgggacaagttcttcattttgctctttattaagtcaaatattatggaaatatctacttattagcacccaagacaaataggggaaaggtttagatgtttttgtgtttttaagactataaccacctgcaactggaggacagggctgataacgggtttggccacaaaatggaaagcaagcaaaatcagacctcgtaaggggagtatcacacacagtcacgactacttcccagagccaaacgagaagtccctgaactagaagtgccattcaaagaatctcgtgaccatcacacacccagcccctgggtggcacatgggttgagggaggcccacacttcaactcctccctgttctgaatgacaccacctcactctaatgtattgtgtgtgttttagagaaacaatatggtgtgttgtgtctagtgaggaacgcctccctacctctgtcctttctgcaacccaaccatgcgtgcttttcctctaagagccgcgtgactgtacgtgttgaagggggcggtacctgttcacagcacaagtttatgttgagctctgaactgtcattcacagctgcgtgtctgcatggtgtcgcatctgttgtacctttggggaaaatttgtatgtaaatgtacagaaataaaaatgttgccccattaa

SEQ ID NO: 133 - DNA, 1313 bp, Mus musculus
agattcgcctccggcagctgcaactgtcttcgctggtaaccttttccggaaacgctcgtcacggaggggcgggactagcgtctcctaatgttgactaatcgcttagcaaccgggaggcttacacctttggaagctcttagagactctagcctcggatcccagccctcttcccgcccctctcctcccctaaactccctccaccttggtgctgccaaacatctggatctccctgggcagcacgaggggttgaatttctaccactagagccttttagagtgttttcccgaccccctgctcacttctgtaaaagccactggtttttcttccacacctctgataagaacaagacgttttctaggaagaatgtggtagaaaaagagaccctgaccttaaacaaatgcccagacaagatgccgaagaggactaaactgctgccacaacagacgttccaggtgcaccagcctcgttccctggtttctgagggcttcacagtcaaagccatgatgaaaaactcagtcgtgcggggtcctccagttgcaggggcatttaaagaaaggccggccaaacccaccactttccgaaaatgttatgagcgaggagacttcccaatcgcccttgagcatgactcgaaaggaaacaaaattgcctggaaggttgagattgagaagttggactaccatcattacctgcctctgttttttgatgggctttctgaaatgacgtttccctatgagttttttgctcggcgaggaatccacgacatgctggaacacggagggaacaagattctacctgtcattcctcagctcattatcccaataaaaaatgccttgaacctccgaaacagacagatcatctgtgtgacgctcaaggttctccagcatctggttgtgtcttcggagatggtgggcgaagctttgttgccctactaccgtcagatcctgccaatcctgaacatctttaagaacatgaatgtgaactccggggatggcatcgactacagccagcagaagagggagaacattggcgacctgatccaggagaccctagaagccttcgagcgctacggaggggaggacgccttcatcaacatcaaatacatggtgcctacctatgagtcgtgcttgctgaactgaccgggcagctgccggagggagcctcccttggtgtcacagccgtctgtccctaaagtcctagcatctcattacttgtgacttctacagctgcaaacatagtagtttctgggccaaaagactgttagccctattgtaagcaaggctttcccatatataaatagtgcctgtttcttagat

SEQ ID NO: 134 - DNA, 2930 bp, Mus musculus
gaaagtttgtccccagggcgtggtgcagacgctacagattttcccagctccagagctggaagatctgagaggacctggtgtgccccgggggttctttttcctgagccctgagccgggagcttggagttcccgaatttgtccctccctcctctgcacccggcagcgactggtccccaccttctcactggcaatccagagggaagaggggaatcagagagatgttgtggctgtggttagggctcagtgggcagaaactattgctttggggcgcagcgagcgcggtctccctggccggcgccactatcctgatcagcatctttccgatgctggtaagctacgcgcggaaatggcagcagatgcggtcaatcccgtcggtggcccgcgcctaccccttggtgggacacgcgctttatatgaagcccaacaacgcagaattttttcagcagctaatttattacacagaagaatttcgacacctgccgatcattaaactttggattggacccgtgcccctggtggcactttataaggcagagaatgtggaggtgattttgaccagttctaagcaaattgataaatcgtttttgtacaagttcctacagccatggctgggactaggacttcttacaagtacggggagcaaatggcgcaccaggaggaagatgctaacgcccactttccattttaccattctggagaacttcttggatgtcatgaatgagcaagcaaatatattggttaataagcttgaaaaacacgtcaaccaagaagcctttaattgttttttttacatcactctttgtgctctggatataatctgtgaaacggctatggggaagaacatcggagctcaaagcaataatgattccgagtatgtccgtacagtgtataggatgagtgatatgatatatagaagaatgaagatgccctggctttggtttgacctttggtaccttgtgtttaaagaaggacgggaccacaaaaggggactcaaatgcctacatactttcaccaacaatgtcattgctgaacgagtcaaagaaaggaaggcagaggaagactggacgggtgctggcaggggtcctatcccctccaaaaataagcgcaaggctttccttgacttgcttttgagtgtgactgatgaggaaggaaacagattaagccaggaagacatccgagaggaagttgacaccttcatgtttgagggtcacgatacaactgctgctgcaatcaactggtccttatacctattgggcacgaatccagaagtccagaggaaagtggatcaggagctggatgaagtgtttggaagatcccatcgtcctgtcaccttggaagacctgaagaaacttaaatatttggattgcgtcattaaggagactctccgagttttcccatctgtccctttatttgcccggagtcttagcgaggactgtgaagtgggcggttacaaagtcacaaaaggaacggaagcaatcatcattccctacgcactacaccgagaccccagatacttcccagatccagaggaattccgaccagagcggttctttcctgaaaattcccaaggacgccatccctatgcctatgtgccattttctgctggacctcgaaactgtattggtcaaaagtttgctgtcatggaggagaagaccattcttgcctgtatcctgaggcagttttgggtagaatccaaccagaagagagaagaactcggcctggctggagatttgattcttaggccaaataatggcatctggatcaagctgaagaggagacatgaagatgacccctaactccatcctcaagctgtgactttattaatgaagatcattccataggaaacatggtatctgtaaatttttagattatgaattgaaaactatgaatcttcaaacctagtgtttttcctttcttgtcccccccactcctgcaccccagatcttgggacacagtctatcactgagaattttggtgtgtttcttaccaacatgggtgccacatcacacttggtctctctctcgagggcacagttagctagctggagcagcactgacataaacatgcaggaaaaattataacagagggaccatcggcctgcccaaagatcatcatttaaatgaaatctcagaattaagaaaatgttctcattgacttggaaattcatatatcatttgaaaatgttgggtcactaagccctcaggataatgggcttaagtttttatgatgtcatcagagatatcagttatgatgggagtagttgttaaaacactttcagattttataatgaaaagcaggccccttgcatgcccctgtcaaggtacagtcacctcgtggactgtgtgctagaatcttctttctgttctcagtcgacacaataacgttagacatcttattactggaagatatccctctccagcacatctaacctctcacagaagcttagttagtggcttttgaagttcaagtggccacagaaacttcctggttatgtgccattctattaagaataggggtatggagtagaggagacatcaaatttctgccatggctaaaagtagctaaaatgtctacactgaggcctctccacttccattctgatttactctctcccacaatatattttggtgttgtggaagtcaagaccgtgattggatgagttagaactcaggatttatgtccttgatgtggccatgtctttcttgtaattcctctacttttagtagaaagaatctttccttctatatttagttacactgtatgatcgcacttggttcagcccgagacatctaattaacccagccccatggagtattctccccaagctgtcaactgaattccattccttgcattttaatttggcacacaaggctactattcctcacacaatgacttttagaaacttctcttaataaatcatttttaacagc

SEQ ID NO: 135 - DNA, 3303 bp, Mus musculus
atggctggagcctccgtgaaagttgcagtgagggttcggccctttaatgcccgtgagaccagccaggatgccaagtgtgtggtcagcatgcagggcaacaccacctccatcattaatcccaaacagagcaaggatgcccccaaaagcttcaccttcgactattcttactggtcgcatacttcggtggaggatccgcagtttgcatctcagcagcaggtgtaccgagacataggagaagagatgctactccatgcctttgaaggctacaatgtgtgcatctttgcctacgggcagacgggggctgggaagtcctacaccatgatggggcggcaggagccggggcagcagggcattgtgcctcagctctgtgaggacctcttctctcgagtcaatgtgaaccagagtgcccagctttcctattcagtagaggtgagctatatggaaatctattgcgagcgagtacgagacctcttgaaccccaagagtcggggctctctgcgggtccgggagcaccccatcctaggcccgtacgtgcaagacctgtctaaactggctgtgacttcctatgcagacattgccgacctcatggactgtggaaataaggcaagaaccgtggctgccaccaacatgaacgagaccagcagccgctcccatgccgtctttactattgtctttacccagcgatcccatgaccagcttactggcctggattcagaaaaggtcagtaagatcagcttggtggacctcgccgggagtgagcgggctgactcctcaggggcccgggggatgcgtctaaaggaaggcgccaacatcaataagtccctgactacgcttgggaaggtgatctcagccctggcagatttgcaatcaaagaagcggaagtcggattttatcccctatagagactcagtgcttacctggctgctcaaggagaatttgggtgggaactctcgcacagcaatgattgcagccctgagtcctgctgacatcaattacgaggagacactcagcactctcaggtatgcagaccgcaccaagcagatccgatgcaatgctgtcatcaacgaggaccccaatgcccggcttatccgggagctgcaggaggaggtggcccggctgcgggacctgctgatggctcaggggctgtcagcctctgctctaggaggtctaaaggtggaagaggggagtcctggaggtgttctgccccctgcatcatctccccccgccccagcttcaccctcatctcctcccccacataatggggagctggagccctcattctcacccagtgccgagccccagattgggcctgaggaggccatggagaggctgcaggaaacagagaagatcatagctgagctgaatgagacttgggaggagaagcttcggaagacagaggctctgagaatggagagagaagcattgctggctgagatgggcgtggctgtccgggaggatggcggtactgtgggtgtcttctctccaaaaaagactccccacctggtaaatctgaatgaggaccccttgatgtctgaatgtcttctctaccacatcaaagatggcgtcaccagggttggccaagtagatgtggacatcaagttgactggccagttcatccgggagcagcattgcctcttccgcagcatccctcagcctgatggagaagtgatggttactctggagccttgtgaaggagctgagacatatgtcaatgggaagctcgtgacggagctgctggtgctgaagtcaggaaacaggattgtaatgggcaagaaccatgttttccgcttcaatcacccggagcaggcgcggctggaacgagaacgtggggtccccccgcccccaggacctccctcggagcctgtggactggaactttgctcagaaggagctgctggagcagcaaggcatagacatcaagctggagatggagaagaggctgcaggacttggagaatcagtaccggaaagagaaggaagaggctgaccttctgctggagcagcagcggctgtatgcagactctgacagcggggaagactctgacaagcgttcttgtgaagaaagctggcggctgatttcctccttgcgggagcagctgccccctaccacagtacagaacattgtcaagcgctgtggcctgcctagtagtggcaagcgcagggcccctcgaagagtctatcagatccctcagcgacggcggctccagggcaaagacccccgatgggccaccatggctgacctgaagatgcaggcagtaaaggagatatgctatgaggtggccctagccgacttccgccacggacgagcagaaattgaagccctggctgctctcaagatgagggagctgtgccgaacctacggcaagccagagggtcctggagatgcctggagagccgtggccagggatgtctgggatactgtgggtgaagaagaaggatgtggaggtggcggaggtggcagtgaggagggagcccgtggggcagaggtggaggacctccgggctcacatcgacaagctgacagggatcctgcaggaggtgaagctccagaacagcagcaaggaccgcgagctgcaggccctgcgggaccgcatgctccgcatggagagggtcatcccgctgactcaggatcttgaggatgataatgacgagtctggtttggtcacctgggccccaccggaagggccagaagcagtagaggagacagtgcccaacgaccactcaccagctgtccggcccacctcaccacctctgtccagctgggagcgggtgtcgagattgatggaagaggaccctgccttccgtcgcggccgccttcgctggctcaagcaggagcagctgcggctgcagggactgcagggcgctgggggccggggtgggggactgcgcaggcctccagcccgctttgtgcccccgcatgattgcaagctgcgcttccccttcaaaagcaaccctcagcacagggagtcctggccaggaatggggagtggagaggccccagctcctcagcccccggaagaggtcactgtccccccagcaccccctaaccgtaggcctccaagtccccgaagaccccaccgttctcgcaggaattccctagatggagggagccgatctcggggagggggttctacacagccagaaccccagcgcttacggccccaaaagcacaacggttatccccaacagccccagcccagcccagcccagcggccagggccccgctacccaccatacactacccctccgcgaatgcgacggcagcgctcagcccctgacctcaaagagagcggcgccgccgtctga

SEQ ID NO: 136 - DNA, 3890 bp, Mus musculus
gactctccggacgcgtcaccgccctcgtttccgaccgctcgggagaccggcagtgctattagtgcacggcggggccgcgacggagggcagtacggtgcctggttcgctggctcacgccagcaggtcggtgcgctcgctcacctgagccatgtcccggggcctcagagccacccggctgtacgcgtgctaccacccgccgggaagcgctcggagatgggcagctggagaagttgacgaaccccctacgcacgcggcgcccttgctgcccagaggggctgcagccagcggtttgccgcgcgtgcctgtttgccaaaggagccgccccggcgaggatcgccggaggggagccgcttcaagcggggagacccgcagcccagacacgcgctctgggcggcctggatgcgcaagagccggccccgcagccgctgacagccggcggcagcgaagtttggctgctgagcggctcggcgccgggcccctggacagactgtcagccggcggctacaacctccggagcgatgcccgtggggggcctgttgccgctcttcagtagccctgggggcggcggcctgggcagtggcctgggcggggggcttggcggcgggaggaaggggtctggccccgctgccttccgcctcaccgagaagttcgtgctgctgctggtgttcagcgccttcatcacgctctgcttcggggcaatcttcttcctgcctgactcctccaagctgctcagcggggtcctgttccactccaaccctgccttgcagccgccggcggagcacaagcccgggctcggggcgcgtgcggaggatgccgccgaggggagagtccggcaccgcgaggaaggcgcgcctggggaccctggagctggactggaagacaacttagccaggatccgcgaaaaccacgagcgggctctcagggaagccaaggagaccctgcagaagctgccggaggagatccaaagagacattctgctggagaaggaaaaggtggcccaggaccagctgcgtgacaaggatctgtttaggggcttgcccaaggtggacttcctgccccccgtcggggtagagaaccgggagcccgctgacgccaccatccgtgagaagagggcaaagatcaaagagatgatgacccatgcttggaataattataaacgctatgcgtggggcttgaacgaactgaaacctatatcaaaagaaggccattcaagcagtttgtttggcaacatcaaaggagctacaatagtagatgccctggatacccttttcattatgggcatgaagactgaatttcaagaagctaaatcgtggattaaaaaatatttagattttaatgtgaatgctgaagtttctgtttttgaagtcaacatacgcttcgtcggtggactgctgtcagcctactatttgtccggagaggagatatttcgaaagaaagcagtggaacttggggtaaaattgctacctgcatttcatactccctctggaataccttgggcattgctgaatatgaaaagtgggatcgggcggaactggccctgggcctctggaggcagcagtatcctggccgaatttggaactctgcatttagagtttatgcacttgtcccacttatcaggagacccagtctttgccgaaaaggttatgaaaattcgaacagtgttgaacaaactggacaaaccagaaggcctttatcctaactatctgaaccccagtagtggacagtggggtcaacatcatgtgtcggttggaggacttggagacagcttttatgaatatttgcttaaggcgtggttaatgtctgacaagacagatctcgaagccaagaagatgtattttgatgctgttcaggccatcgagactcacttgatccgcaagtcaagtgggggactaacgtacatcgcagagtggaaggggggcctcctggaacacaagatgggccacctgacgtgctttgcaggaggcatgtttgcacttggggcagatggagctccggaagcccgggcccaacactaccttgaactcggagctgaaattgcccgcacttgtcatgaatcttataatcgtacatatgtgaagttgggaccggaagcgtttcgatttgatggcggtgtggaagctattgccacgaggcaaaatgaaaagtattacatcttacggcccgaggtcatcgagacatacatgtacatgtggcgactgactcacgaccccaagtacaggacctgggcctgggaagccgtggaggctctagaaagtcactgcagagtgaacggaggctactcaggcttacgggatgtttacattgcccgtgagagttatgacgatgtccagcaaagtttcttcctggcagagacactgaagtatttgtacttgatattttccgatgatgaccttcttccactagaacactggatcttcaacaccgaggctcatcctttccctatactccgtgaacagaagaaggaaattgatggcaaagagaaatgaaagacattttctattttactctgcttcgttccctcactgcataccttaataattccttttctggtaatcagacatatgatgaactcttattgattggcaaacgtctatgattctcctaagttctacaattgttttgcagtcttttatgtttagtgccataagcctaggtggacctcaattccttattcagctagtagatccacagattctgcctgtctttttctttttctcaaggaatctattgtttctgaaattcataaagttgcaaaatcattttcataatagaaccgtctaccagtgacctcttgattatgatttgatttgactgcaaaacttcttcctcctctatgaggagatgctgtctgcttcgagctgtaatgttttgccatgttgcaaaaagccataataataaattaagtatttaaaaaaaaaaagcttttttttccttttcaagttcatgttaatctggtttgtctgtccaccagaaacaggtcttacaactgtgacagcctcttagcaggtctatcgttatttgatagaatgtcttctagagtactccactctcattgtgattcagatgagaaagccatcccagaagagctggcgacactggcctcatctcttcacaagtgcagtatcttcttattgggtgattatgttcatgtttcctcactttcatttcgttctctgcttttgctctaaatgccctgtgtcatctctgtatcacatactgcttaatttctcccatcacccacgacacagcaaggggagctcctgagttatgcagaatgccaggttacccaattacaattttgaaagagaaaagacctaacttctaacatgccaggttttcctttttaatgaatccattccaaaatctcctctctaaaaagagagggagaattccatatgactagctcatgggtatacatttcctctttgggtctctttaagcaaaggatgcattgcacttggttcagatctgaaaaggtctcttcccaggtgtagctcatcattgaacttcagtttatgaacatgagcttttacccagtgaaaaaagcatttctgatttacctactcctattcagctaaaggagaaagtaaaatctaattaactcttaaggacacactgtattaaatgtgcttacattccacataaagatcttaacttacaaataatttatagggatggatccactccctcataatttgatctgcaacagatcaaaatgattatatgattcttctaaaccttatcttgaactatgaatgattttcccaaggacaaattttgtgatagcttgtgttaccacacctgttctttatatgaaagatcagatatgattcatatgtactgaaagacaaagacaagaaccacctcaatttcaacctactatggtcaat

SEQ ID NO: 137 - DNA, 3186 bp, Mus musculus
caaacctaattccggtcgcattgtggttacccaaaaaaaaaaaaatctgagagccgcctgcaaatggtcactttttaaaaactggcgtgggtggtctttaggggagcgctcttgtccctgtgccctttgcatccccggtgcgtgtccccgcgctgcgggacaggataggcaggttcggtggctttgttgaacccagacccacgaggatgtccgcgcgatcccgcctccggcttcccggcccctccgggcccgtcgcccccgccgcgcgccaccccaggccttgctgtcctgtgttcctccgggtcagacttgtggtcaagacccgcccccgcgtcgcctggaccctcctcaaaaggtcacttcccctcccggggggattcggttgctccggtgtgagtcaggcagtgcccaggaccggaccctcggctcctccccaccctccagcccgcgcccgcgggacaatccttgccttgtctcgccgtctgcatctcgggttttcggtggcctcgggttacgccttttttccagggcggagtcccgagcacagctcctcctctcagcgggctcggtttccccttttcccagaatcttcccggggcgtcggaatccaggcgctcagctcagcgccggtgcgggcctgggtgtagcctaagcgtgctgctagccatggctgcggcaggcccggaaccccggcttttgctcctgctcctgctgctgctgccgccgctgccccccgtaacttctgcctccgatcgaccccggggcgccaatgctgtcaacccagacaaattgctggtgatcactgtggctacggcagagacagaggggtaccggcgttttctgcagtctgcggagttctttaactacactgtacggaccctgggcctgggacaggagtggcgagggggtgatgtggctcgaacagttggtggaggccagaaggtcaggtggctcaagaaggaaatggagaaatatgcagatcagaaagacatgatcatcatgtttgtggacagctacgacgtgattctggcaagcagcccgacagagctgctgaagaagtttgttcagagtggcagtcatctgctgttctctgctgagagcttctgctggcctgagtgggggctggcagagcagtaccctgaggtgggcatggggaagcgcttcctcaactctggtggattcatcggctttgctcccaccatccatcagattgtccgccagtggaactacaaagacgacgatgatgatcaattgttctacactcaactgtacctggacccagggctgcgggagaaactcaaactgagtctggaccataaatcccggatctttcagaacctcaatggagccttagatgaagtgatcttaaagtttgaccagaatcgtgtgcgcatccggaatgtggcctacgacacacttcctgttgtggtccatggaaatggtcccactaagctccagctcaactacctggggaactatgtccccaatggctggactccccagggaggctgtggattctgcaaccagaccctgaggacactcccgggggggcagcctcccccccgggtgcttctggccgtgtttgtggagcagcctactcccttcctgcctcggttcctgcagcgcctactgctcctggattaccccccggacaggatctctctcttccttcacaacagcgaggtgtaccacgagcctcatattgcagatgcctggccacagctccaggaccatttttcagctgtaaagctggtggggccagaggaggccctgagcgcaggggaggccagggacatggccatggacagctgtcggcagaaccctgagtgtgagttctactttagcctggatgctgatgccgtccttacgaacccggagaccttgcgtgtcttgattgaacaaaacaggaaggtaatagctcccatgctttcccgccatggcaagctctggtccaacttctggggtgccctgagccccaatgagtactacgcccgctccgaagactacgtggaactggtgcagcggaagcgagtgggcgtgtggaatgtaccctacatatctcaggcatatgtgatccgcggggagaccctgaggactgaactgccccaaaaggaggtattctccagcagcgacacagacccagatatggctttctgcaagagcgtccgggacaagggcatcttcctccacctcagcaaccagcacgagtttggccggctgctggctacttctcgctatgacacagaccacctacacccagacctctggcagatctttgacaaccctgtggactggagagaacagtacattcacgagaattacagccgggccctggatggggaagggctagtggaacagccatgcccagatgtgtactggttcccactgctgaccgagcagatgtgtgatgagctggtggaggaaatggaacactatggccagtggtctggaggccggcacgaggattccaggttggctggaggatacgagaatgttcccaccgttgatatccacatgaaacaggtgggatacgaggaccagtggcttcagctgctgcggacatatgtggggcccatgacggagtacctgttccctggctaccacaccaagacacgggcagtgatgaacttcgtggtccgctaccggccagatgagcagccctcgcttcggccacaccatgactcgtccaccttcactctcaatgtcgccctcaaccacaagggtgtagattatgagggaggcggctgccgcttcctgcgttacgactgcagaatctcctctccgaggaaaggctgggccctcctgcaccctggccgcctcacacactaccatgaggggctgcccaccacccggggtactcgatacatcatggtgtcctttgttgacccctgacactcaaccagtctgccaaaccttctctgccactgtgccttgttggacaacctgggtcgccattctcagagagaggggacgctgcccgtctcatctcccgagagtgtctgtgtgcctgggatggaatgtgctggtcccaacagtcctcaggaggtccctggagtcttccacttgcccactgaccccatggactcagggaaagtggacttctgagggtcccctgcctgataaattattaagcttcctcagcctcactttcaataaaaggatgtttgtaaaaaaaaaaaaaaaaaa

SEQ ID NO: 138 - DNA, 2607 bp, Mus musculus
ggagacgagcaggaggaagtggggaccgaccagttgagcaccaccagaggccggggagcgagggggtctcaagtgacccctgggaaactccggtgtcggaaaggagccgagcgcctacatgaaaggaggaaccttctcggaagttcgcccctacctgagccgggaactccagcttcaggatccgcggcgctttccccgcgtgctggctcggtggccgcgtctacacacgacccgtgaggatccggatggccgtgaggtggacctgggcaggcaagagctgcctgctgctggcccttttaacactggcttatattctggtggagttctcagtctccactttgtatgcctctccaggagccggcggtgccagggagctggggccaaggcggctcccggaccttgatacaagggaagaggatttgtctcagcctctttatataaagccccctgcagattcccatgctcttggggaatgggggagagcaagcaaactccagctcaacgagggggaactgaagcagcaagaagaacttattgagagatatgccatcaacatttacctcagtgacaggatctccctgcaccgccacatagaggataaaagaatgtatgagtgtaaagccaagaagttccactacaggtcgctccccaccacctccgttatcatcgccttctataacgaagcctggtccactctgcttcggaccattcacagtgttttagaaacttctccagctgtgcttttaaaggagatcatcttggtggatgacttgagtgatagaatttatttgaaggcgcaacttgaaacttacatcagcaacctggagagagttcgcttgattagaaccaataagagagaggggctggtccgggcccgtctaattggggccacttttgccaccggggatgtcctcactttcctggattgtcactgtgagtgtaacactggttggttggaaccacttttggagaggatcagtagagacgaaaccgcaatcgtatgtcctgtcatcgacactattgactggaacactttcgaattctacatgcagaccggggagcccatgattggtgggtttgactggcgtttgaccttccagtggcattctgtccccaaacatgaaagggacaggcgaacgtcaagaattgaccccatcaggtcccccaccatggcaggaggactgtttgctgtcagcaagaagtattttcagtacctgggcacctatgacactggcatggaagtctggggaggcgaaaaccttgagttgtctttcagggtttggcagtgtggcggcaagctggagatccacccatgctcgcacgtgggccacgtgtttcccaagcgcgcgccctatgctcgccccaacttcctacagaataccgcgcgggcggccgaagtgtggatggatgaatacaaagagcatttctataaccgaaaccccccagctcggaaagaggcctatggcgatctttctgaaaggaagttactaagggaacggctgaaatgtaagagcttcgactggtatctgaaaaatgtgttctctaacttacacgtccccgaggatagacctggctggcacggagccatccgcagcatgggcatctcttccgagtgcttagattataacgctcccgacaacaaccctacgggggctaatctttcgttgtttggatgccacggtcaaggaggcaatcagttctttgaatatacttcaaacaaagaaatcagattcaattccgtgactgaattatgtgcagaggtcccccaacaaaaggattatgtagggatgcaaaactgccccaaagacgggctcccagttccagtgaacatcatttggcattttaaagaagacggaacgatttttcaccctcacacaagactgtgtcttagtgcttaccggacagccgagggccgacctagtgtccatatgaaaacgtgtgatgcccttgataaaaaccagctctggaggtttgagaaataggctagcagcagagcgccttctcttcgggagctgacagtagcctccggaaagtcaccgtgccccaagatgactgtattttaccagaagtcacctggcagctgtctgtaagaacactggaaagccgtggttcatctggggatatcactctgaagctgggtacacagagcaccgctgctcaatatctcaaagtgccttctttgctctcgggttgttttatttaaaagctttgtcaatatggtctcctgcaactccttaaagaaagctgctgtgaactgagatacacaaaacactgaagtatgggtgtagcttagcagtagaatgcttagctagcatgtgcaagaccctgagtctgacccacagcaccacaaactacatgcaagacttaatatttagaacataaaagtccagacaaaatggggtatgattcattctgatttgtaaattcattgcatgtacttttctttcttcttttcttttctcttcttttctttatcaaaacatgtgaatgtgtaattagaactattactttctgattacattctttcagccagcacattacattttaggtttttaaaaaccaacttgtctttggtaaaataaaagttgaagaaatttgatcttgagg

SEQ ID NO: 139 - DNA, 2545 bp, Mus musculus
ctcgcctgctcttacgaccgctgtctctccgggctcccggacgcccccttcccggcccagctctccgtcgaggtccctcgcccaggtcctttgcctgattcgcccaggagtgcgcctcatcggcccggggagcagcgaagccagagggggcgcacgcacggggagcccctttgtagacttcacggctgccaacatctgggcgcagcgcgagccactgctggccgccgcctcgcctcggggaccataggaggcgcagccccaaggccggagatttcgcttcgggactagctccccgggatgcggtagcggccgctgtgcggaggccgcgaagcagctgcagccaccgccgcgcagatccacgctggctccgtgcgccatggtcacccacagcaagtttcccgccgccgggatgagccgccccctggacaccagcctgcgcctcaagaccttcagctccaaaagcgagtaccagctggtggtgaacgccgtgcgcaagctgcaggagagcggattctactggagcgccgtgaccggcggcgaggcgaacctgctgctcagcgccgagcccgcgggcacctttcttatccgcgacagctcggaccagcgccacttcttcacgttgagcgtcaagacccagtcggggaccaagaacctacgcatccagtgtgaggggggcagcttttcgctgcagagtgacccccgaagcacgcagccagttccccgcttcgactgtgtactcaagctggtgcaccactacatgccgcctccagggaccccctccttttctttgccacccacggaaccctcgtccgaagttccggagcagccacctgcccaggcactccccgggagtacccccaagagagcttactacatctattctgggggcgagaagattccgctggtactgagccgacctctctcctccaacgtggccaccctccagcatctttgtcggaagactgtcaacggccacctggactcctatgagaaagtgacccagctgcctggacccattcgggagttcctggatcagtatgatgctccactttaaggagcaaaagggtcagaggggggcctgggtcggtcggtcgcctctcctccgaggcacatggcacaagcacaaaaatccagccccaacggtcggtagctcccagtgagccaggggcagattggcttcttcctcaggccctccactcccgcagagtagagctggcaggacctggaattcgtctgaggggagggggagctgccacctgctttcccccctcccccagctccagcttctttcaagtggagccagccggcctggcctggtgggacaatacctttgacaagcggactctcccctccccttcctccacaccccctctgcttcccaagggaggtggggacacctccaagtgttgaacttagaactgcaaggggaatcttcaaactttcccgctggaacttgtttgcgctttgatttggtttgatcaagagcaggcacctgggggaaggatggaagagaaaagggtgtgtgaagggtttttatgctggccaaagaaataaccactcccactgcccaacctaggtgaggagtggtggctcctggctctggggagagtggcaaggggtgacctgaagagagctatactggtgccaggctcctctccatggggcagctaatgaaacctcgcagatcccttgcaccccagaaccctccccgttgtgaagaggcagtagcatttagaagggagacagatgaggctggtgagctggccgccttttccaacaccgaagggaggcagatcaacagatgagccatcttggagcccaggtttccctggagcagatggagggttctgctttgtctctcctatgtggggctaggagactcgccttaaatgccctctgtcccagggatggggattggcacacaaggagccaaacacagccaataggcagagagttgagggattcacccaggtggctacaggccaggggaagtggctgcaggggagagacccagtcactcaggagactcctgagttaacactgggaagacattggccagtcctagtcatctctcggtcagtaggtccgagagcctccaggccctgcacagccctcccttctcacctggggggaggcaggaggtgatggagaagccttcccatgccgctcacaggggcctcacgggaatgcagcagccatgcaattacctggaactggtcctgtgttggggagaaacaagttttctgaagtcaggtatggggctgggtggggcagctgtgtgttggggtggcttttttctctctgttttgaataatgtttacaatttgcctcaatcacttttataaaaatccacctccagcccgcccctctccccactcaggccttcgaggctgtctgaagatgcttgaaaaactcaaccaaatcccagttcaactcagactttgcacatatatttatatttatactcagaaaagaaacatttcagtaatttataataaaagagcactattttttaatgaaaaaaaaaaaaaaaaaaaaaaaaaaa

SEQ ID NO: 140 - DNA, 4260 bp, Mus musculus
acgatcgaacggctcaactttgcgaggtgaggtgtcaaaaagggaaaagtgaatgtggctttcgctccacggggtgtgctgtcgtctggggccgtcagggagctcagcccttgtgttgtgccagggtggggtccagggtctggcactgaggagggtagcctgctggctgaagtggcagagcagtggccttgatttgtcttgtggaagatttaaaaacaaaaaagcataaatattctggtccttcagcaatgctttctctgaagaaatatttaacggaaggacttctccagttcaccatcctgctgagtctgattggggttcgggtggacgtggatacttacctgacctcacagctcccccctctccgggagatcatcctggggcccagctctgcctatacccagacccagttccacaacctgaggaataccttggatggctatgggatccaccccaagagcatagacctggacaattacttcactgcccggcggctccttagtcaggtgagggccctggataggttccaggtgcctaccactgaggtcaatgcttggctggtccaccgagacccggaggggtctgtctctggcagccagcccaactcaggcctcgccctcgagagttccagtggcctccaagatgtgacaggcccagacaacggggtgagagaaagcgaaacggagcagggattcggtgaagatttggaggacctgggggctgtagcccctcctgtcagtggagacttaaccaaagaggatatagatctgattgacatcctttggcgacaggatattgatctgggggctgggcgtgaggtttttgactacagtcatcgccagaaggagcaggatgtggataaggaactgcaagatggacgagaacgagaggacacctggtcaggcgagggtgcggaagctctggcccgagacctgctagtagatggagagactggggagagcttccctgcacagttcccagctgacgtttccagcatcccagaagcagtgcctagtgagagtgagtcccccgcccttcagaacagccttctatctcctcttctgacggggacagaatcaccatttgatttggaacagcagtggcaagatctcatgtccatcatggaaatgcaggctatggaagtaaatacatcagcaagtgagattctgtacaatgcccctcctggagaccctcttagcaccaactacagccttgcacccaacactcccatcaatcagaatgtcagcctgcatcaggcgtccctggggggctgcagtcaggacttctccctcttcagccccgaggtggagagcctgcctgtggctagcagctccacactgcttccactcgtccccagcaactccaccagtctcaactccacctttggctctaccaacctagcagggcttttctttccatcccagctcaatggcacagccaatgacacatcaggccctgagctacctgacccccttgggggcctgttagacgaagctatgctggatgagatcagcctgatggacctggccattgaggagggcttcaacccggtgcaggcttcccagctcgaagaggagtttgactctgactcaggcctctccttggactccagccatagcccttcctctctgagcagctctgaagggagctcttcttcttcctcctcctcctcttcctcttctgcttcctcctctgcctcttcttccttctctgaggagggtgctgttggttacagctctgactctgagaccctagacctagaagaggctgagggtgcagtgggctaccagccggaatactccaagttctgccgcatgagctatcaggatccttctcagctctcttgccttccctacttagagcatgtgggccacaatcatacatacaatatggcacccagtgcccttgactctgctgatctaccaccacccagcaccctcaagaaaggtagcaaggaaaagcaggctgacttcctggacaagcagatgagccgagatgagcacagagcccgagccatgaagatcccattcaccaatgacaagatcatcaacctgcctgtagaagaattcaatgagctgctgtccaaataccagctgagcgaggcccagctcagcctcatccgggatatccggcgccggggcaaaaacaagatggctgcacagaactgccgcaagcgcaagttggacaccatcctaaacctagaacgtgatgtggaggacttgcagcgagataaggcccgattgcttcgagaaaaggtagagttccttcggtctctgcgacagatgaagcagaaggtccaaagcttataccaggaggtgtttgggcggctgcgggatgagcatgggaggccctactcacccagtcagtatgcccttcagtatgctggggatggcagtgtcctcctcattcctcgcacgatggctgaccagcaggctcggcgacaggagagaaagccaaaggaccggaggaagtgagcctggggaggcagggggtggacgctcactaagaccgaaactggagaagggctgggcctggacctaacattggggacttaaatgccttcttatccaatatatcttctcagatgggatgactgcgggtcagtgcaccgaagaggcgggcgcaggcgctgtctggctcagctgcccccttggggtgggcagggaggaccagactgcttgggtgattggggtccccagcctattccctttctcttgaggggagggtagtgtcggcatgctggaagtagaggagctgtgtggagtgaaggagagaaagtgtgggagatctcattgctggaaggagaaaaggaaggaatcccccgaaaatcaaagcagtcagaaaaaccagagcgactgttaagggctttggccagctttctaggcagcgagtgcaggtgacaacggtggtctagggagagttactggtatggaacacagacatggcggggccccagaaggcctttgtaactgtttcttcaactcttgcatccctgaagggaagatgctcttggatgcacctgtaatatcttagttactgaatgggaagctgtaggggccgaggagggcagagggtataggaagtgagaacgaggcctgtgtcgcagcagcccagcatcaagcatgtcacacactgccctgccacagccacctccctccctggccatcccagagccgaggctcccactgtcctcagagagcctgcatggaaatgctgtcctcttccactctcctcctctttttgatacccaccctcactagctgcctccagctctggagtggggtgctattctggcagtatctggaacttggcctacagcttcctctgcagggtctaaacagggaaggcacgtgtggaggagtggtcccagtgacatccaggcaccattcagcacaacactgggaagtgattcttccctcaggcccctctgcctaccaacacctgggctcctcactgggggaaacaaaagcctataaaccccagcaacaaaacctagtcctcttagacgttcttgcgctttgatttttttagggcgtgtgccctgttacacttatagggcctaggatgcttgtgttgagtaaaaaggagatgccccaatattcaaagctgctaaatgttctctttgccataaagactccgtgttaactgtgtaaacacttgggatttttctcctatgtcccgaggtctggtcttgatttcttttttgggtttctttctaggaaaatgagaagtgcatgcaaggggcaggagatgaccctcccctaggctttcagcttcaggcagcttcttcacagcctgttcagcctgggctcctggaggacagccctgggggaggcagtgaggggcagcgccaagatagccaggtggttggttccaggaccacagtgtcttttttttgttgttggttttttgttgttgttgtttgtttgtttgttttttaactgccactgccgccccctgacccccaatcttggtcagctctggagtactgcctgccccagacgagcaggggttgggggggagcactgatcctcctccctgggcagggcagagggctttcctaaccgagcagtagggatagaaagcgtgagcctgggagtgctttttataaattattttccttgtagattttatttttaatttatctctgtgacctgccagggagaggagagaaagaaatgctgtgagcacatgacaaaataaaatcaaataaaatggaaaaaaaaaaaaaaaaaaaaaaaaaaaaaaaaaaaaaaaaaa

SEQ ID NO: 141 - DNA, 2584 bp, Mus musculus
atgggaccagaagtttctagccggccagttgctgccttctctttatctcctccttcccctttggcagctaggaggctatttccagacacttccacccctcttcggccacgtcacccagtcctttaattcataaaggtgcccggcgccggcttcccggacacatcggctacacagaggtgcccgcactccacgacctcgtgacccgcgccctagctctgcgccccgggcggaccctaacccagcatgagcgccgccacccaatcgcccatgatgcagatggcgtccggcaacggagccagcgaccgagaccccctgcccccgggctgggagatcaaaatcgacccgcagaccggctggcccttcttcgtggaccacaacagccgcaccacgacgtggaacgacccgcgtgtgccccccgagggccctaaggacactgcatcttcagccaatggcccttcccgcgatggctcccgcctgctgcccattagggaaggccaccccatatacccccagctccgaccaggctacattcccatccccgtcctccatgaaggctccgagaaccggcagccccaccttttccatgcctactcccagcctggggtgcagcgatttcgtaccgaggctgcagcggccactccgcagaggtcccagtctcctttacgtggcggcatgacagaagccgcccagacagataaacagtgtggacagatgccggcaactgcaacaactgcagcagctcagcccccaactgctcatggacctgagcgatctcagtctccagctgcctctgactgctcatcctcttcctcctcggccagcctgccctcctccggcaggagcagtctgggtagccatcagctccccaggggctacatccccatccccgtgatacatgagcagaatatcacccggccagcagcccagccctccttccaccaagcccagaagacccactacccagctcagcagggtgaataccagccccagcagcctgtataccacaagatccagggcgatgactgggagccccggccgcttcgagccgcttctccattcaggtcacccgtcagaggtgcttccagccgggaaggctcgcccgccagaagcggcacaccggttcactgcccatctcccatccgtgtgcacacagtggttgacaggcctcagcccatgacccatcgagagcctccacctgttacccaacccgaaaacaaaccagaaagtaagccaggcccagccggaccagacctccctcctggacacatccccatccaagtgatccgaagggaggcagactctaagcctgtttcccagaagtcacctcctcctgctgaaaaggtagaagtaaaggtctcctctgctccaattccttgtccctctcccagccccgctccttcggctgtcccttctccccccaagaatgtggctgcagaacagaaggcggcccccagccctgcccctgcagaacctgcagcccccaaatcgggagaagccgaaacaccccctaagcatccaggtgtgctgaaagtggaagccatcctggagaaggtacaagggctggagcaggctgtagacagctttgaaggcaagaagactgataaaaaatacctgatgatcgaagagtatttgaccaaagagctgctggccctggattccgtagaccctgaaggacgagctgatgtgcggcaggccaggagagatggcgtcaggaaggttcagaccatcttggaaaaacttgagcagaaagcaattgatgtcccaggtcaagtacaagtctatgaactccagcccagcaaccttgaggccgagcagccactccaggaaatcatgggtgccgtggtagccgacaaggatgagaaaggtcctgaaaacaaagatccacaaactgaaagccaacagctagaagccaaagcagccacacctccaaatcccagcaacccagcagactcagctggcaacctggtggctccctagtgtcccctgggaccatgctgtagagacttttaagttgcatgcactgcgggacttgcagtcagctggctgccattattcatagccacttggtatgcagtaacttggggtggaggtaaaacactaacaaagggggcttttcttccatagtctattctgtataaataataagttgcctgttccagaagtctaaccctaacccctctggttgtctgggacccctttctgtgcatgggtgcaatgatttagccatggctgtgggctatctgggtacaatgatttagccgtggctgtgggctatctgggtgcaatgatttagccgtggctgtgggctatcttcctgttagccttggactgaaggggttttaagttttgaggggtaggaagagagttacaggaatagagaacctgtttttgagacatgttgtcattttgatgagataaccctcatctcgttactgaaatatctaacttcagctagatatgagctatgcaaggagccataggaatagctatatgttggaatggctttaatgttgttacatttgaggggggatggaaaataaagtgattatataactctcaaaaaaaaaaaaaaaaaaggcctaca

SEQ ID NO: 142 - DNA, 4909 bp, Mus musculus
gcagctccgagctaggtgctatcgcaaggccagagcgcacagcccggcggagagagcagatccttgctcagatcgagtcaaatcggggccaaggcggaggacgaagagtccaggctcctattctggacttgttccccagctccgggggcgcttctaggtcctgcagcagccaggagtgcggagccaccaactcggtgctggaatgaaaaaattcccgcgcgccagtgcagaatctttctaagtgacccggagcttcgggtgctagctctgcacgaactttcccatcaaagtgatcgtgaattttaagcatcaggagcaggccagcgaagctctacgcgtctaaacgtctatccagaccaagagttctctgcggtgcagggtgcggtgccatgcagccaaaagtccctttggggtcacgcaagcagaagccctgctccgacatgggggacgtccagcgggcagcgagatctcggggctctctgtccgcacacatgctgttgctgctcctcgcttccataacaatgctgctatgtgcgcggggcgcacacgggcgccccacggaggaagatgaggagctggtcctgccctcgctggagcgcgccccgggccacgattccaccaccacacgccttcgtctggacgcctttggccagcagctacatctgaagttgcagccggacagcggtttcttggcgcctggcttcaccctgcagactgtggggcgcagtcccgggtccgaggcacaacatctggaccccaccggggacctggctcactgcttctactctggcacggtgaacggtgatcccggctctgccgcagccctcagcctctgtgaaggtgtgcgtggtgccttctacctacaaggagaggagttcttcattcagccagcgcctggagtggccaccgagcgcctggcccctgccgtgcccgaggaggagtcatccgcacggccgcagttccacatcctgaggcgaaggcggcggggcagtggcggcgccaagtgcggcgtcatggacgacgagaccctgccaaccagcgactcgcgacccgagagccagaacacccggaaccagtggcctgtgcgggaccccacgcctcaggacgcgggaaagccatcaggaccaggaagcataaggaagaagcgatttgtgtccagcccccgttatgtggaaaccatgctcgtggctgaccagtccatggccgacttccacggcagcggtctaaagcattaccttctaaccctgttctcggtggcagccaggttttacaagcatcccagcattaggaattcaattagcctggtggtggtgaagatcttggtcatatatgaggagcagaagggaccagaagttacctccaatgcagctctcacccttcggaatttctgcaactggcagaaacaacacaacagccccagtgaccgggatccagagcactatgacactgcaattctgttcaccagacaggatttatgtggctcccacacgtgtgacactctcgggatggcagatgttggaactgtatgtgaccccagcaggagctgctcagtcatagaagatgatggtttgcaagccgccttcaccacagcccacgaattgggccatgtgtttaacatgccgcacgatgatgctaagcactgtgccagcttgaatggtgtgactggcgattctcatctgatggcctcgatgctctccagcttagaccatagccagccctggtcaccttgcagtgcctacatggtcacgtccttcctagataatggacacggggaatgtttgatggacaagccccagaatccaatcaagctcccttctgatcttcccggtaccttgtacgatgccaaccgccagtgtcagtttacattcggagaggaatccaagcactgccctgatgcagccagcacatgtactaccctgtggtgcactggcacctccggtggcttactggtgtgccaaacaaaacacttcccttgggcagatggcaccagctgtggagaagggaagtggtgtgtcagtggcaagtgcgtgaacaagacagacatgaagcattttgctactcctgttcatggaagctggggaccatggggaccgtggggagactgctcaagaacctgtggtggtggagttcaatacacaatgagagaatgtgacaacccagtcccaaagaacggagggaagtactgtgaaggcaaacgagtccgctacaggtcctgtaacatcgaggactgtccagacaataacggaaaaacgttcagagaggagcagtgcgaggcgcacaatgagttttccaaagcttcctttgggaatgagcccactgtagagtggacacccaagtacgccggcgtctcgccaaaggacaggtgcaagctcacctgtgaagccaaaggcattggctactttttcgtcttacagcccaaggttgtagatggcactccctgtagtccagactctacctctgtctgtgtgcaagggcagtgtgtgaaagctggctgtgatcgcatcatagactccaaaaagaagtttgataagtgtggcgtttgtggaggaaacggttccacatgcaagaagatgtcaggaatagtcactagtacaagacctgggtatcatgacattgtcacaattcctgctggagccaccaacattgaagtgaaacatcggaatcaaagggggtccagaaacaatggcagctttctggctattagagccgctgatggtacctatattctgaatggaaacttcactctgtccacactagagcaagacctcacctacaaaggtactgtcttaaggtacagtggttcctcggctgcgctggagagaatccgcagctttagtccactcaaagaacccttaaccatccaggttcttatggtaggccatgctctccgacccaaaattaaattcacctactttatgaagaagaagacagagtcattcaacgccattcccacattttctgagtgggtgattgaagagtggggggagtgctccaagacatgcggctcaggttggcagagaagagtagtgcagtgcagagacattaatggacaccctgcttccgaatgtgcaaaggaagtgaagccagccagtaccagaccttgtgcagaccttccttgcccacactggcaggtgggggattggtcaccatgttccaaaacttgcgggaagggttacaagaagagaaccttgaaatgtgtgtcccacgatgggggcgtgttatcaaatgagagctgtgatcctttgaagaagccaaagcattacattgacttttgcacactgacacagtgcagttaagaggcgttagaggacaaggtagcgtggggagggctgatacactgagtgctggagggatccagtgagtcaaaccagtaagcagtgaggtgtggcaaggaggtgtgtgtaggggatacatagcaaaggaggtagatcaggacactaccctgccagttacattctgataaggtagttaatgaggcacagtagcatctgaaagaccatacagagcactaaggagccccaaagcactattagtatctcttttcttatatctatcgcccaaataattttcagagtctggcagaagccctgttgcactgtactgactagatacttcttatcacaaagattgggaaaggcaaagcagaaagatggtaagactgggtttcaaacaaggcttggtttctatcactggaggcaaggaggaggggacaaacaagatcattattcgaagtcgctggttgctgtggttttacggaaggttgatgcatcattcctatcaacagtgaaaagttcagcttgttcaacgtgacagaaaggctcatctccgtgaaagagctcctgatttcttcttacaccatctcagttcttaactataattcatgttgaggtagaaacaattcatctatttataaaatgtacattggaaaaaaaaaagtgaagtttatgaggtacacataaaaactgaaggaaacaatgagcaacatgcctcctgctttgcttcctcctgaggtaaacctgcctggcgattgaggttgtttaagattatccatggctcacaagaggcagtaaaataatacatgttgtgccagagttagaatggggtatagagatcagggtcccatgagatggggaacatggtgatcactcatctcacatgggaggctgctgcagggtagcaggtccactcctggcagctggtccaacagtcgtatcctggtgaatgtctgttcagctcttctactgagagagaatatgactgtttccatatgtatatgtatatagtaaaatatgttactatgaattgcatgtactttataagtattggtgtgtctgttccttctaagaaggactatagtttataataaatgcctataataacatatttatttttatacatttatttctaatgataaaacctttaagttatatcgcttttgtaaaagtgcatataaaaatagagtatttatacaatatatgttaactagaaataataaaagaacacttttgaatgtgtatgcctattttctggagtgggattaacttctgggcaagaaatctgatgagacacaaacattggacttcaagacagttttaaattttgggtaaatgaactgtatttcctgtttatagacgtactaataaaaaagaagttgatgatgtctttagtggtaagattgttactaatgtggttggcaaattgctgtaaagagccagatagtaagcatttatggcattgtaggctatctttcctgccacaaccatgtgacagtgagtgctttgtaggactgagagcagccataaatgacatgtaaatgataaactgtggctgtgctttaataaaactttatttacaaaaacaaaaaaaaaaaaaaaaaaaaaaaaaaaaaaaaaaaaaaaaaaaaaaaaaa

SEQ ID NO: 143 - DNA, 3019 bp, Mus musculus
  modified_base (2432)..(2432): a, c, g, t, unknown, or other
aattcccgcacgcgcagtgcactcccttgcggccgcgggaaaattccaaacacgtcaaaacaaaaaaggttccgtgagctgtgccaagttttcaagccgcagaagccgggcggtggcttcttttccgccgcagcccagtctgctgaggcagctctgggtgaggaccacccgggaagaccgccgtttcctgctagggcagagaagactcgcgagaacgtgcgcccgagtctcaacgtgggcgagccgcgctcccggggggtggagctgaggcaggacggctgctgtgaagggacagtgctgctctcagagatggctcaggagtctgcagaccttgcttctgactgtcagtcttggctgcagaagctttctgcatgggaacaggcctcttctgaggaaacccagaaggacacttgtcttcacttgtccgggttccaggagttcctgaggcagatgtatgaaatcttgaaggagatggattctgatgcaatcctggaaaggttccccacaattggtcaactgttggcaaaagcttgttggaatcctctcatctttagcatatatgaaagccaaaaaattgtaatatggtgcttatgttgtctgatgaacaaagaacctcggacttctgcagagtcaggacttaactcgtggatccggggtttgttatctcatgtactttctgcattcagattcgacatgaaagaagtttgtctttttaccaaaagtcttggatatgagtctattgattactatcctagtttgcttaaaaatatggttttgtcattagtgtctgagctcagagagagtcatcttaatggactgagcactcaaagtcggatggctcctgagcgcatgatgtccctgtcagaagtttgtgtccctcttgtcactctgcctgatatggaacccctggtagaggctctactcacctaccatggacatgagccccaggaagtcctggctcctgagttcttcgaagctgtaaatgaggccttcttgtcggaaaaaattgttgtacccacgtcctctgtggtcagcctctggtttcggcatctccccagtcttgaaaaagcaacgctgcatctttttgaaaagcttttctccagcaagataatttgcctgagaaggatggagtgctgtataagagagtcattcctgcctcaagcagcctgccaacctgccatcttcagaattgttcatgaaatgttcaggtttgtgctgctgaaaactgacggagccccagaagtactagctgctcttcaggttttcacatcgtgcttggtagaagctctgaaaaaagaaaacaagcagctgacgtttgccctcaggacctactttccttacggtgctccatgtcttgctgcagcgctgtcccagcaccctgaagcaatcccacagggacaccggctccagcctctgctgcacatttcccaactcctcagagaagcagttgaagactgtactcgtgggtctccgcgaaatccctttgagagctggtttttgtttgttcactttggaggatgggttgacctggctgtggcagagttactgctgagggaggaagctgagcctcctgctggcctgctgtggctcttggtgttctattacagcccacaggatgggagtcagcagagagagcagagcatggtggagctgaaggtattaatcaaccgtctcctgatgctgctcagaagcggccccctctcagctactgatctgcaggaagcagctgagagtcccagtggagaccccagaccacctgtatgtggacagctggtcagacgccttcttcttagtctcttgctctggaccccagaaggccatgcaattgtctgggaagctgtcacccatggtccgacttttgagatcacaggcccaggatgctgccccaggatatggagatccacaaagccacagcacagacccagagcccacctgtgctgtacagagatggcccacacggatgctgtaatccatgagattattggttttcttgaccagaccttgtacagatcacaacatctttgtgttgaagcctcgagaaaactggccagagacctcctaaaggagctgcaagcccaggtctagcaggtagtacagaatgtgggcacctgcggtgaagctccctcagtggatgagatgctgtttctgaggcaagaacaagtgagagtggttgaacatattcgtgccttggcctgatggagtgatgtgtaccacctcccacgctgtactgcctggccccggcggtccatgagtattatgaagggaagggcccagactgcctgttaggttccagccattcataagagctagcactggctggtgtgctgactctctttatccttccctctctagtgaaggtgtgggggatgcccagtagcaggagacatgagccctgtagtggatgaggctgtaccgtacagatgagcacctgnctcaccggtgactgtcgctcagtgaggcctttgttcctcagtgcagaaatgctgcaaggcaccactatagtggaaggaatgagaggtggccagagaagggtcattccttcctcctcctctaaacccccaaaaggcaaaacacatctgcttccctatgtctagtaaacaggatttggaaactgagagtgagtccttgtcctcctgcacttgctgtgggtggggatgacgggcatggctgttgttttctagtgagaatatatacaagtgagcagtgtgtgggctgtgaccctcctgcacatctgctatgagaacccttgccccatgtgaaatcagcttcaattctcacagtaggacatttgatgactgcactcaggctgtctaggggggttgtggcataaagtcatgaaggcctgggttttctcttgcatctgcacatccaggctttgccgggcaaacactgactggcagtggattcgtcttttacccacctgctgatgggctcacagtggagtggagctggactttctactttttcattctgaataaaaagttgtacttaatttaaaaaaaaaaaaaaaaaggaattc

SEQ ID NO: 144 - DNA, 1305 bp, Mus musculus
ggtctgcgttcatctctgtcttcttggattaatttcgagggggattttgcaatcttctttttacccctacttttttcttgggaagggaagtcccaccgcctccggaaggcctccgacacttctggtcgcacgggaaggtttttttgcctcttgggttcgtatctggacttgtactttgctcttggggatcttccgtgggggtccgctgtggagtgtgactgcatcatgaccctggaagagctggtggcgagcgacaacgcggttcagaagatgcaggcggtgactgccgcggtggagcagctgctggtggccgcgcagcgtcaggatcgcctcaccgtgggggtgtacgaggcggccaaactgatgaatgtggaccccgacagcgtggtcttgtgcctcctggccatagacgaagaagaggaggatgatatcgctctgcagattcacttcaccctgatccagtcgttctgctgcgacaatgacattgacatcgtccgggtatcaggcatgcagaggctggcgcagctcctgggggagccggcggagacattgggcacaaccgaagcccgagacctgcactgcctcctggtcacgaactgtcatacagattcctggaaaagccaaggcttggtggaggtggccagttactgtgaagagagcagaggcaataaccaatgggtcccctatatctctctagaggaacgctgagacccactccaaacatctaaagcaactgtcgagttgctgtcccctaaaaaaagtaaataaaatacatatttgacagccccctcatcccccagaacaatccctcaaaggctaccctacccgtgataccttctgggaggggcggagtcaccgagactgagatgaggagaggggcacgtgcgcccgcccgccctctgggctgtggagccaggagcagcaccacaggtggtcgccgaggtcggaaggagggcacctcaggcaagaggagactgagactttagagccaaggcctggcagtcctgcagccagcctctgctcgcagccgcagacggtctggacaccgccgcaggggtggggtgaggcgtcccccaccctgcgggacagtgaactgtgcataagtcagcggagggcgacgaccctcgccgcgggacccgggactcgagcccgggacttcgcagctacagcacatctatttttaatattgtgctgagcaagacagatcgcttgcatatttttaaaaatttctactacagagacattccaataaactcgttaagccttaaaaaaaaaaaaaaaaaaaaaaaaaaaaaaaaaaaaaaa

SEQ ID NO: 145 - DNA, 4602 bp, Mus musculus
cggcacgagtcccgggcgccgtcgtgctgtcgtctccggtgctcgctctcggccgcggtgtcgcgcttgcccttcgcgcccgcagcccggcagcctctccacggccgcgacccctcgcgcacctgcctcgccgggagatagtggataacctccttcaaaatggaagatggaaagcccgtttgggcaccccaccccacagatggatttcagatgggcaatattgtggatattggccctgacagcttaacaattgaacctttgaaccaaaaaggcaagacatttggggctctcataaaccaagtatttcctgcagaagaggacagcaaaaaagatgtggaagataactgttcactgatgtacttaaatgaagccacactcctccacaatgtcaaagttcggtacagtaaagacagaatctatacatatgtggccaacattctgattgcagtgaatccatactttgatatacctaagatatattcttcagatacaataaagtcatatcaaggaaaatctcttgggacgatgccaccccatgtctttggcattgctgataaagctttccgagacatgaaggtgctcaagatgagccagtctatcatcgtatctggagaatcaggagctggcaaaacagaaaatacaaagtttggttctaagatacctgacagaatcttatggacaggtcaagatattgatgatagaattgttgaagcgaatccacttttagaagcatttggaaatgcaaagactgttcgcaacaataatagcagtcgatttggaaaatttgtagaaattcatttcaatgaaaagagttcggttgttggaggatttgtttcccattaccttctagagaagtctaggatctgtgttcaaggcaaagaggagcggaatcaccatattttctacaggctctgtgctggggcttcagaagacatcagggagaagcttcacttgagctccccagataatttccggtatttaaaccggggctgcactagattcttcgctaacaaagaaacggacaaacagattttacagaaccgaaaaagtcctgagtatgttaaggcaggttccttggaaggatcctctattagacgaccatggagattttatcaggatgtgcacagccatgaaaaaaattggtttgggatgatgaagaaaaactttgatctgtttcgagttgtagctggtgtcctgcaccttggaaatattgatttggaggaagccggaagcacttcaggtggctgcaatctgaagaacaaatctgccccatccctggaatactgtgctgagctgctgggcttggaccaagatgatcttcgagtcagtttaaccactcgagtcatgctcaccacagcaggggggaccaaaggaaccgttataaaggtccccctgaaagtggagcaggcaaacaatgctcgcgatgctctggcaaagactgtctatagccatctctttgatcacgtggtgaacagggtaaatcagtgctttccttttgaaacatcttcttattttattggagtcctggatattgctggtttcgagtactttgagcacaacagcttcgagcaattttgtatcaactattgcaatgagaaactccaacagttttttaatgaaaggatcctgaaggaggaacaagaactgtatcagaaagagggcctgggtgttaatgaagtccattacgtggacaatcaggactgcatagaattaatcgaagtgaagttagtggggatcctggatattctggatgaagaaaatcgtcttccccagccgagtgaccagcacttcacgtctgtggttcaccagaagcacaaagaccacttccggctcactattcccaggaaatctaagctggcagtccacaggaacctcagagacgatgaaggctttatcatcaggcaactttgcaggggccgtgtgctacggagacaaccccagtatgggggaggaaaaaataatgatgcactacatatgtctcttgaatccttgatatgtgagtccagggataagtttataagggcattatttgagtcatctacaaataacagcaaagatacgaaacagaaggctggaaaacttagcttcatcagcgtgggaaacaagttcaagacacaattaaatttgcttctggataaacttcgaagtaccggagccagcttcatccgctgcatcaaacccaacttaaagatggcgagtcaccacttcgaaggcgcccagattctgtctcaacttcagtgttcaggtatggtgtctgtgttggacctaatgcaagggggtttcccttcaagagcctcgttccatgaactctataacatgtacaagaagtacatgccagaaaaacttccaagattggatccgaggttattttgtaagcctctttttaaagctttgggattaaatgaagttgactacaagtttgggctgacacaagtatttttcagacctggcaagtttgcagaatttgatcagattatgaagtctgaccctgatcacttagcagagttggtgaaaagagtcaacctgtggctagtctgtagtcgctggaagaaagttcagtggtgttcactgtcagtcatcaagctgaaaaacaaaataaaatatcgagctgaagcatgcattaaaatgcagaaacccatccgaatgtggctttgcaaaaggaggcacaacccacgcattgacggcctggttaaggtgggcacactcaagaaacgactcgataagttcaatgaagtcgtaagtgcgctgaaagatgggaagccggaggtgaacagacagatcaaaaatcttgaaatttctattgatgctctaatggccaaatttacgtccaccatgatgacgagggagcagatacagaaagagtatgatgcacttgttaaaagctcagaagatctcctcagtgcactgcagaaaaagaaacagcaagaggaggaggccgagaggctgaggcgcatccaggaggagatggagaaagaaaggaagaggcgtgaagaagatgaggaacgtcggcggaaggaggaagaggagaggcggatgaaacttgagatggaaccgaagagaaaacaagaagaggaagaaaggaagaagcgggaagatgatgaaaagcgaatccagtctgaggtggaggcacagctggcaagacagcgggaggaggagtcccagcagcaggcggtcctggcccaggagtgcagggacagggagttggccctgcgcatcgcccagaacgagtcggagctcatcagcgatgaggcacagggtgacatggcactccgaagaggtcctgcggtgcaagctaccaaggctgcttctggtaccaagaaacatgatctcagtaaatggaaatacgcagaactacgcgatacaatcaatacttcctgtgacattgagctcctggcagcttgcagagaagagtttcacaggagactgaaagtgtatcatgcttggaaatccaagaacaagaaaagaaacactgagaccgagcagcgcgctcccaagtcggttactgattatgattttgcaccatttttgaacaattcacctcagcagaatcccgcagctcagctccctgccaggcagcaggagattgacatgaaacgacagcagcgtttcttccgcatccccttcatccgccctgcggaccagtacaaagaccctcagaacaagaaaaagggctggtggtatgcccattttgacggaccctggattgctcggcagatggagctgcaccctgacaagccacccatccttcttgtagctggcaaggatgacatggagatgtgtgagctgaatctcgaggagacgggtctgactcgcaagcgtggtgctgagatcttgcccagacagtttgaagagatctgggagcgttgtggaggcatccagtaccttcagagcgccattgagagcaggcaggcccggcccacctatgctacggccatgctgcagaacctgctcaagtagaccggagggttccagcccagccccgaccctcccaggtggagaggtgacccgaaggctcaccacttccttgctcctggtagaaatgccttatgcaaagcgaacagattttattaatcatggattttgttaatttgttcaaggttaattaaggttgaggtagtggattcaggacctacagaaagaaaagccctgattccagcagcgcccctcccttgcctgctctgttggggggctttctgcacccagacagacgctgataattcttgctctgcacactgaccaccttattgctgagtattgtcaaggacaagacttttttttttaattcaaaacatttgactttttaaaggaaaggatgtcacagtgtctttataaccgagataatgaaatcttagcttaattttgtgcaagaattaaggtactcggatttgattaaggcacagatgtgtttgggtctaaaaggctgtatttttggcttgctttcacacaaatctatggaaattgatttccctctactaataattgaaaatgtgaatgaggttttcttatggaggctgtcttactgcttagacttaccctctgttggtcctgtgattgatggcagaggtgtagttactgaaataaacaacctgttcttcctcttta

SEQ ID NO: 146 - DNA, 4247 bp, Mus musculus
ccccagtggagtaatgtggacaggctggccagctcgggcgctgggaggaggaggaggcagggtctcaggcagccgcggcggcagtgctcggagcggcaggagcagtagcagcagaaacaagtaccagccagacaacagctcctccggcaagccacagtcagtcccctagccgcgatggcgctgccaagcccggcgagcgaggaagctgaggggccctgtcaggaggcaaaccaggaatatcaggagccggtgtgtagtcctgtgcccgagccggagccagagccggagcccgaaccggagcctgaccccgagccggtgccagtgcccccgcccgagcctcagcctgagcccgagccccagcccctacccgatcctgcacccctgccggagctgggctttgaggctgagcccgagccccagcccctacccgatcctgcacccctgccggagctgggctttgaggctgagccagtgcaagaacccgagcccacgcccactgtggaaacccgaggcaccgcgcgtggctttcagcctcccgaaggtggcttcggctggatagtggtgtttgcagccacctggtgcaacggctccatcttcggcatccataactctgttggtatcctctactccatgctactagaggaggaaaaagagaaaaatcgccaagtggagttccaagcagcatgggtcggagccctcgctatgggcatgatcttcttctgttctcccattgtgagtatattcactgaccgtttgggctgccgaatcacagccaccaccggggccgctgttgctttcattggcctccacaccagctccttcaccagctccctaagcctgcgctacttcacctatgggattctgtttggttgtggctgctcattcgcctttcaaccatcactcgtcatcctggaccactactttcaacgtcgcctaggtctagccaatggtgtggtatctgctggaagtagcatcttctccatgtcttttcccttcctcatcaaaatgctgggggataaaatcaagctggcccaaaccttccaggtgctgagtaccttcatgtttgtccttacgctgctctcactcacttaccggcccctcctgccaagctcccaggacaccccaagcaagagaggtgcccacaccctgcgacagcgctttctggttcagttcagaaagtacttcaacatgcgtgtattccgccagcgcacttaccgtatctgggcctttgggatcgctgctgctgcccttggttacttcgtcccctacgtgcacctgatgaaatatgtggaagataagttcaaggagatcaaggagacctgggtgctcttggtgtgcattggggctacgtcaggcctcggacgtctcgtctcgggccacatcagtgactccatccctggacttaagaagatatacttgcaggtcctctcattcctgctcctgggcttgatgtccatgatgatccccctatgccgggacttcgggggccttatcgttgtctgcctcttcctgggcctatgtgatggcttcttcattaccatcatggctcccattgcatttgagctggtgggacccatgcaggcctcacaggccattggctacctcctgggcatgatggccctgccaatgattgctgggccccccattgcaggcctccttcgaaactgctttggtgattaccatgtggccttctactttgcgggtgtccccccaatcattggagctgtgatccttttcttcgtccctctgatgcatcaaaggatgtttaagaaagagcagagagattccagcaaggataagatgctgtcccacgatccagaccccaacggagaactgctgccaggctccccaacacctgaagagcccatttaatgcctctgtcttgccattgtgtgctccttccccccccccccactccacccctcatcctaccctgcttagcatttacattttttgccaccagcacacttgttcccaaacctgtgcacacagcatttcagccacctgaccatctcctctgagccaatgctctcggtgttccaaactcattaaccaaattctccccatgaatgccttgaaacttgccaggctcttctcccaaaatctgggaaagtgtgggatcaccccctggcctttggatcctcccccatatatactttctaactctttgcggggaggacagggatgggatctctagccccagattgttagtcacccactacaatcaattgccaaaggtgctactgtgtccccagaacccagtgagacagacctaagcctctgtttgctgaggaatttgttgccatccatccttgggaaccatttgggaattgtgagaaggaaggccaaaggagaccaggagccttgttttgcatcgaagctcctgaggattctgcggcaccccatcatatggttggttagccgtctgcttcccttttcctttcctagtattttctctctacttcctcttctccgatttcttcccctctattcctttttattagtgtcatgacacataggtgcttggagaaaggaaagacccagagcttgggccaatccacttcattctgacccagaccatccctaatattagcattaatactgctcatctcaggttgagctacatctcactttctgggctcaaactgatatggactggaagagcaggctatcgcatagggatgggaatcttcaacactacagagttccatgtaccagtcactgattttgacagattaaccaagaggccttcccagtttcccatccttcccacctgtcaaatgtgaagaaacttttctcatttcatgaaacacaggaggaaagatgtcagtgcactggcattagaggagatgctacggttaacggtttggggaaggaccaactcctccgtctctcatttttcataagaggtcaatatttccacctgggccaggccaagaaatgaactgctttaaggaaaaaaaaaaaaacctcattctgtacctggatctccaaatgacataggcaacaactgcacgtaggggttggataatttcttttcagaaggggaagccaccctagcctttaccacccacccagtctgtcccccattctaggcatcctgaaccactctgctgagtgggcattataggtgccaaaaaaagtaggctctggaccaccatcatccctttgaagttggtgccaaatattttcctacatccaggctctgggcaacagtcttactgaagcacattccaagtgcccctggccaaaggcaaagggcactgccagcctcgtccagttgtacggctcacctcattagggactcagcctctctcctccctgtttctctctctctctgtgtctctctctctgtctttgtttattgtgttcctgtaccaaccttttatcatctttttgccaggcatcctggctgttacttggacccaacaataacttgccaccccaagctagggtcatcccaaggccaggaagatgaggttgctctgaggggctccaaagaatacaatggtccccacacatgagtttttccgttactaacaggcagctggggcatagttggcctctgatgtttcattcaaggccaaagtcctgagcccccctctgctggtcccaatccagctcttatcaactccccaaaggaaaacccattggttcttggctctgaggacaggaaggggtggagtcactgtcctgtcaactcaagcatctatggaacaggagaagctgggccccaggagccctgcgacttcccaggaagaggccattgaaaatactgaagcaacaatgcttccacttccatttctccttaccccacccccttccaggccatttagggggtagggggcagaataagtgtgcagggcttcctttgttgctcatggctggacagctctaaagagtcaggctgccactcacttttctccagatgatggaaagacattcacaggtcccagatttgcccattcaggtgtcacctaacattggcagggtgtcaatttacttttttatttttcacaaatgcgtgtgtgcacgtgtgggcttgtgtgctttccgagagaatgttgtttggccaaagcagcacagtattaatatttagagtaggaagcagccttttaggcaccacagttaaaaactaagagaacgaacaaaatttcagagcttgagacctgggacatttaaatcctcaaggggtttggaacaaaataaacagatttaaaaaaaaaaaaaaaaaaaaaaaaaaaaaa

SEQ ID NO: 147 - DNA, 2987 bp, Mus musculus
gggcccagctggatccctcgcctgccgcccctcagccccaggtcggagtccggccttcacccactcctctcggccaggtccggcctccccgcggggtcacgcggctgccccggggacgatgaacggaggataaatggtgcccaaggcagacagcggtgccttcctgctgctcttcctgctggttctcactgtcaccgagccgctgcggccagagcttcggtgcaaccctgggcagtttgcatgtcacggtggtaccatccagtgcatacccctcccctggcagtgtgatggctggccaacgtgtgaggataagagtgatgaagccgactgtccagtgactggagaggcccgtccttatgggaaggaaactgtggatctgcggcaggggcgagccagaggaggtgaccccacacacttccacacagtgaacgtggctcagcctgtacgcttcagcagcttcctagggaaatgcccaagtgggtggcaccactatgaaggcacagccagctgctaccgggtctacctcagtggagagaactactgggatgctgcacagacctgtcagcgtgtgaatggctcacttgctaccttctccactgaccaggagctgcgcttcgtcctagcccaggaatgggaccagccagagcggagcttcggctggaaagaccagcgcaagctctgggttggttatcagtatgtcattactggccggaaccattccttagaaggtcgctgggaagtggcattcaaaggctccccagaagtgttcctgcccccagatcccatcttcgcctctgccatgtctgagaatgacaacgtgttctgcgcccagctccagtgtttccactttcctaccctgaggcaccatgacctccacagctggcacgccgagagctgctctgagaagtcttcgtttctgtgtaaaagaagtcagacgtgtgttgatatcaaagataatgtggtggatgaagggttctacttcactcccaagggagatgacccatgcttgagctgtacctgccatcgaggggagcctgagatgtgtgttgctgccctgtgtgagcggccccaggggtgtcagcagtaccgcaaggaccctaaggaatgctgcaaattcatgtgtctggacccagatggcagcagcctgtttgactccatggctagtgggatgcgcctggtcgtcagctgtatctcctccttcctcatcctctcgctgctgcttttcatggtccaccggctagcccagcggcgccgggagcgcatcgagtccctgattggagcaaacttgcaccatttcaaccttggccggaggatccctggctttgactatggtccagatgggtttggcacaggcctcacgccactacatctttctgacgacggggaaggtgggactttccatttccacgaccctccacctccttatacagcttacaagtacccagacatggaccagccggatgatccaccaccaccctatgaggcgtctatcaacccagacagtgtgttctacgaccctgcagatgacgatgcctttgagcctgtggaggccagcctgccagccccaagagatggtggcattgaaggtgcattgcccaggcacttggatcagccgctgccccctgcagagacatccttagcagatctggaagactctacagacagtagcagtgccctgctggtgcctcctgatcccgcccagagtggaagcaccccagctacagaagcaccgccagggggtgggcgcctcccccgtgcttccctcaacactgtggtttaggtggctcagcttgtggccccccgtggctaggagtgtatgtttcttgtccagaagacacctatctcagtgggggacttgaaggggtcctgtcatagcctggaccctactccactgccacatccccaccagctgcgggtgtgtacatagaaactgaaatcaggcactcagagaggagcaagtgcctgtaccatctttacctgggggctgttagtctcttctttaaatggtggaatgacacaggtgttgaaagcacacgtttccaagaagcagaggcagtgggcttcacttataccaagtacatctttggatgggcttgcttactgcattctcacccttaggagccagtcatcagccagtgtagacacagtagagctagcgctagtggctgcttagaggcagcagagcatctgaactgcttctggggaaagcattcacagctgctgtactggctctctgggggcttcctgtccggggccagctgcaaatttcaaggtgccgatcgatccctgggaggaaattgaacttgccacaccatttctagctttgctttgaggccagcactgtggcaggaggccctgctcattcctagcactcttccatggtatacctctgcatggctccccaggagtagactctagacccttgtggagggttggggcatgctggcttttctctgccacactctggatccctgtgctctgcttgctggtgaatgaccactgggtctagccatgcccgttcatcctatctgtgccataaagggttgtttgggaagagaatggttcaagtggacatcctgagttgtcatctgagtccacttcaccccgtgaacactgctggagcccagtgtctgccagccacatacatgcctcccagtccctccacagcaaccgggtacctggggatttttcccaaaggactccattgccagctccagctccatgcagtggtcttgtctcctgatgtaggcctttagcatttctaaggtttggagattaagcaaggttctgtgcaatttttagcacattcgtgtcttttttatgttggatgtctgggtctttatatctgtgtgtgtgtcctaatgtggccaaatgtttgcaggtgataatggttcacaggagctcaggacaggggacaataccccacatgagccatttgcccatgggccactcttgcacctttgagcttctaggctgtggtcagtggg

SEQ ID NO: 148 - DNA, 3623 bp, Mus musculus
ggaaggggggcaggcgcggtgggaaagatggcgtaccagagcctccggctggagtacctgcagatcccgccggtcagccgcgcctatactaccgcctgcgtcctcaccaccgcggccgtgcagttggaattgatcacaccttttcagttatacttcaatcctgaattaatttttaaacattttcaaatctggaggctaatcaccaatttcttattttttggtccagttggattcaattttttgtttaacatgatttttctataccgttattgtcgaatgctagaagaaggctctttccgaggtcggacagcagactttgtatttatgttcctttttggtggatttttaatgactctctttggtttgtttgtgagcttagtttttttaggccaggcctttacaataatgctggtctacgtgtggagccgaaggaacccgtatgtccgcatgaacttctttggtcttctaaacttccaggcccccttcctaccctgggtgctcatggggttttccctgttgctggggaactcaattatagtggaccttttgggtattgcagttgggcacatatattttttcttggaagatatatttcccaatcagcctggtggaataagaattctgaaaacaccatctattttgaggactatttttgatacgccagatgaggatcccaattacaacccactacctgaagagcggccgggaggcttcgcctggggtgagggccagcgccttggtgggtaaagcagcggtgccaattacgagacccatctgagaaagactcagtgacatgtccatgggggtcttttatcccttgttgcaaaagcgtggacagttttgacagcttgacagatttttaactccagaagcactttacgggatggtacactgactaacatagaagacatttccaggagtttgccaggggttcctcactatgctggtactaaaagtataacctcttggagccaaaaactggagacccaggcaccctgcctgtgccgtgagcaagtccatgggtacttgagctcagtggcacaggcgggtgctcctcctcctctttgatagacaaggccgtggtgtaaatggaagttacggagaggacaaaataaaactgaattccatctctctcacactgtatttaagctttcgtgtgatcttttaaatcatggtagtgtgttctagctctcctgcgtatgtttgaacacagcagttaccgtgcctgccctcatgtctccacggctttcaactggatttcatttcaagattggaaatacacagctgctatgtacatctgactaattctagttcagagtcttagcctctggagagggaagattggtttctgccattcagatagttctccatctgaataccatgaagcttcaagtttagaccacaggaggagggagaagggagggtaatttcttgtagccaaggaatctgactgtagagaagccagctataaaccaaaagcaactgtgatatctctttgagttggagttcctctactaagaaatacccagattagtaatggccacccgttgtcaaagcacaggaataagaatgggcagcattgggcatgtgttcctcttgtcattcatttcaagaaaagctcaagacccttccagggccaagggcctggttcaccttcccagtcgggcagaaatcagggtctttggaagcagccacactgatggttcagagtacttatcaaagatggcacatcttgtctgactcaacagttttccattcatgctgctttatcagagctcagaaagatggcctcagacagttttcataaatgtcaaagaggcacaggacttcccaggctgggtcatcctgtttaggctgagttgcttttcagatgagattttctcagaggttagcataggcttaagtaagctctagtaaacattctaggtggaaagtttcagatacatttgaggtagaaagtattttaatgactaagtggaactcgataaggaatggaatgagtacggtactagtaaatcactgaagaccattgtaactctatgggacgtgggccaatgggactgcttttgtcttgtttaaaaatttttaacgtttaatgacaatcttagattgtatgatccttatgggattcttaagtttgataattgtttttgttcaagaaggccttgtcagtaacttttaggaatttatttttattattattgcttgcttttaagccagaaatgggtttctttaaggttttatttattttccctaagttaattttagatttagctagttcatggagttattgtgaccgatctttaattctaaaatctctccaccagctattttcattttaaacagtgaatacctatacatattagtgactgaaaacagaaaatatattttggattattgttagggtgtgaattcctagtggtagaacaccatgctgtgtgacacactgtctcctggcagtgctgatttcagtcacttggcctcttagtagtttggcaggtccctggccctgtgttgtttggcaagatccctgtgctcactgggacacaagggaaagtcctcacttccccagccaacctctcaattccaattcttccaaaacacacttcctttttgcgatatgagtcagcagaaaagtgagattgcattatgggattctgtgaccgcttaaacttacatgaatacagtttgagccatttcctggattgattgtatcagaaatatccgaaaagcacacctaaagcatagggcattttgtttcgttgttacaggaatacagtatatgttcatttaaaaatgaatggacatgccaattgcatctccataggagatagattttatatactttggtgtgtttttttcactatgaatttttacttgtttcttccacttctttttctgtccctctgtgtcctcctgtcttttatatttcttttgtacttgcgtgaggcaaagcgtccacatcctggatcttgaaatggaaccataacactgtctctagagtcctctgggaggaattaggaaacattggagctattggcatgttggcataacatgcttcctagaattgtcatgccttcggccactgtttattttgtggctataatttcctttctcgggtgagttctatctgtgttagctaagatcctgcccttccatcctctcgggatgactaaactacttactgttttgagtttgattcaagttcttgaaccttgcttgtctcgttcagccgctctgttccgaagtctgcaatcacgtcttagcccttatcaaatgcatattttgtgtcttttctctgaaccttgctcctacttctcccttgcaggaacgtcgatttaagtttcttcaagaccttgacactaaactcttaaaactaaggcctatttcactgtcttctttaaatccttatgaagcttcaaatctgtgctaaaattcctataccaaatcatatattgtcttgtactgttcttagctgctacatgtatgttagttttgttcccctcatgagaatgtaagctccttaagggcagggactatgtcttaatttttgtatccaccacagtgcctagcactgtgcttggcacatgggtgctgaataaatactttgtttattgatcagc

SEQ ID NO: 149 - DNA, 4125 bp, Mus musculus
gcctggagccaaagtttctgtctcagttgggacgccgccgcggccgggggcaaagaaagggaggaaggaaggagctcgcggaggggaggggaggagaggggaggcggcctcgggcaaggagtgcagggcgatgcgggcgcgcgtcgcagccccccgaacctgagcgcagtgccccgagcgtcgaacgaggccgcagccatggagcccgcgcaacagccgccgccccagccggccccgcaaggccccgcgccgccgtccgtgtctccggccgggacccccgcggccccgcccgcacccccggccggccaccaggtcgtgcacgtccgcggggactcggagaccgacttggaggcgctcttcaatgccgtcatgaaccccaagacggccaacgtgcctcagaccgtgcccatgcggcttcgcaagctgcccgactccttcttcaagccgcctgagcccaagtcccactcgcgacaggccagtactgatgcaggtactgcgggagctctgactccacagcatgttcgagctcactcctctccagcctccctgcagctgggtgccgtttctcctgggacactcacagccagtggcgttgtctctggccctgccgctgcccctgcagctcagcatctccggcagtcctcctttgagatccctgatgatgtaccactgccagcaggctgggagatggccaagacatcttctggtcaaagatacttcttaaatcacaacgatcagacaacaacatggcaggacccccggaaggccatgctttcgcaactgaacgttcctgcgcctgccagcccagcggtgccccagacgctgatgaattctgcctcaggacctcttcctgatggatgggagcaagccatgactcaggatggagaagtttactacataaaccataagaacaagaccacatcctggctggacccaaggctggaccctcgttttgccatgaaccagaggatcactcagagtgctccagtgaagcagcccccacccttggctccccagagcccacagggaggcgtcctgggtggaggcagttccaaccagcagcagcaaatacagctgcagcagttacagatggagaaggagagactgcggttgaaacaacaggaattatttcggcaggaattagctctgcgcagccagttgcctacactggagcaggatggagggactccgaatgcagtgtcttctcctgggatgtctcaggaattgagaacaatgacaaccaatagttccgatccctttcttaacagtggcacctatcactctcgagatgagagcacagacagcggcctcagcatgagcagctacagcatccctcggaccccagacgacttcctcaacagtgtggatgaaatggatacaggagacaccatcagccaaagcaccctgccgtcacagcagagccgcttccccgactacctggaagccctccctgggacaaatgtggaccttggcacactggaaggagatgcaatgaacatagaaggggaggagctgatgcccagtctgcaggaagcgctgagttccgaaatcttggacgtggagtctgtgttggctgccaccaagctagataaagaaagctttctcacgtggttatagagctgcagggagccactctgagtctgtgagggatccacagagcctaagatgtgcacgcctgaaattcagataagtcagtgggggttctctggctaacacagaaaacagatgaaccagtgtccatcgttgttccgcttttctctgcccgtcgctgctcttacgttggttgctgacctcttcacggccggctctaaagaacccgaaccgcagacagattcctttgttaactctgctatgataactacgttctctgggattgctgggggatggcctgctggataatggatgttctgccttttgtccggtggtcctttcaccatcactttaactgaacacacagactgggaactgaatgctctagaacattgttcaagaggtggtttcttcagctgccttgggtccaacaagccagaggcattgcgtctgatctcgtggaggacggaggggacccacgctgaagactggtgaactttccattcttctgttagcgatgccgttaggccatagtgacctgggtcttatcttagacgcttatgaggcatgagacagcttccatagaaatatattaattattaccacatactctagattaggtttgaatgaatattttctgtgggtgttttggttggtttttctctgccccccccccttttttgtggttggtcttggtggaacgtaggcaaattaatgaattcgtttatagctgtagcttggggtgggcaataccattcttttggtgggaaatctgtatttcttggttttttaacatcctatttaaatcttaaatcttggttatctcctctctacatatatacacactcttattatgtctatggtagtgtgatagcagaatatatctttataaacatttctttcctttccagtttattttttaaatggtacccttgaacatatacatttagacacagtagtttatgtttcacaaatactttaaattctggttggagcaattgcaggtgtttgagggagggtgggcagtgttatagaaagggctctagtgggtaaagccaagaggcgcctcttgccctctgtgcactgtggtgacaacagaagccaacagtgagtggccttacttcccttagcctgatttcatgccatgtagtgtctgagctgtaagctttagagaggcaggcctgccttctgcctccacctcagctttgggtgtacactcagatactgagactgataatccacgaggtcaggttgagtgtcacctacaagatcatgcttaggaaacctcctcccgtgtctgctgagtggaccctggggtagtgtgcagaatgctgcgaggtcataggtaaagtgatcagactagcaagtgtggggtagttggactgagcagagctacaatgaagcatgattatggctttatttttgcaagattactagagtatgtgtctccaggagtaataatggtttccaaagagtattttttaaaggaacaaaataggcatgaattaactctgtgtataagctatgaagtaatagttggttatgaattatagtggcaccagctagcacctctgtcatttaagggtctttgagtgcttctagaagaatcccttattttcaagggttcataatgaacaacaattttcccccctggctaaagctgctactataaaatcctcagcttaggaagatagaaatcttttggccctttgatttagtatagcacaagaatgaagtagaaaagttttattcagtactttgagtgctcaaaaaatacaatcagtgtattatatgtgattcataggtcagtcatttgaggccattgactctaaggcttttaattagaaactagttgaagactcacccttgaattaagtctggggaaatggcctcccggaggatgcagtgactgtagaacagagatgaaattctactctagttgacaattgagcagatggatgatccacaacagtgcgtggggaatgggcagatgataggcgagccgagcgcctatgattggccagcagctgcagaataaaggatggcgtcttctgtgggcagactagctgtagtgtggggagggggaggggaggtgggcatgagctgttgaaaggttaccgggctatgatatagaaaagcttttatgaacttgtttctcttcagtaaagacttatctcgctctcagtaaagaagttcctaagtttgcagctgcttaacctcccccacaaggtggatgtgccgtcttcctcctccctcagcatggtgcgccttgttatacctcaatgtccagcagcccctggtgcctgacagtgctctctgaccttatcaaaccctccatgctgactgtgggagatttaagcaccctgactctcactaaatttgaatcacggcctgaacgtagtctttcttgttgtgtccagcagtgtttaatgcttcctggctgtagtaggtagcatacaggtaagaacttaactggttattcttgaatttcttttacaataaaccaatttttataatcttaaaaaaaaaaaaaaa

SEQ ID NO: 150 - DNA, 2806 bp, Mus musculus
acactctcctcctctggtctcggggtttccagagtttctccagttgcggaagacagctgttatttttctcctgaaagcttttggcacagccggcaggctgaaacttccaggcaccttttggaaaagttgttagggtttgtttgaagctttctttacattttcgtttgggttttcaagccctgactttacggaggcgagctcttcgtttgctttgaagggttcttaaagatttttttcctctccggctttcgtttttcttgaacccactcggctcaatcatggtgatgttcaagaagatcaagtcttttgaggtggtcttcaacgaccccgagaaggtgtacggcagcggggagaaggtggccggacgggtaatagtggaagtgtgtgaagttacccgagtcaaagccgtcaggatcctggcttgcggcgtggccaaggtcctgtggatgcaagggtctcagcagtgcaaacagactttggactacttgcgctatgaagacacacttctcctagaagagcagcctacaggtgagaacgagatggtgatcatgaggcctggaaacaaatatgagtacaagttcggcttcgagcttcctcaagggcccctgggaacatcctttaaaggaaaatatggttgcgtagactactgggtgaaggcttttctcgatcgtcccagccagccaactcaagaggcaaagaaaaacttcgaagtgatggatctagtggatgtcaatacccctgacctaatggcaccagtgtctgccaaaaaggagaagaaagtttcctgcatgttcattcctgatggacgtgtgtcagtctctgctcgaattgacagaaaaggattctgtgaaggtgatgacatctccatccatgctgactttgagaacacgtgttcccgaatcgtggtccccaaagcggctattgtggcccgacacacttaccttgccaatggccagaccaaagtgttcactcagaagctgtcctcagtcagaggcaatcacattatctcagggacttgcgcatcgtggcgtggcaagagcctcagagtgcagaagatcagaccatccatcctgggctgcaacatcctcaaagtcgaatactccttgctgatctacgtcagtgtccctggctccaagaaagtcatccttgatctgcccctagtgattggcagcaggtctggtctgagcagccggacattcagcatggccagccggacgagctctgagatgagctggatagacctaaacatcccagataccccagaagctcctccttgctatatggacatcattcctgaagatcacagactagagagccccaccacccctctgctggacgatgtggacgactctcaagacagtcctatctttatgtacgcccctgagttccagttcatgcccccacccacttacactgaggtggatccgtgcgtccttaacaacaacaacaacaacaacaacgtgcagtgagcctgcaggaaatgaagcatctgtattagcgcatttctttctgcctctctgcttgaactccagtgtttcagagactcagtctctacagcggggaacgggtacaccccagccgctgactcctcaagatgggtggcaatcagtaggcgggtctccggcttcaagtggtgcagaccagtgcccgcactgtggcataggagtgtttgctgggtggatgtcagaacactcttagaaaaattgagacctgaccactttctcggatgttggaaatgaagaacttgtttgtgttgactgagtcagggcactgctgaccttctggcgttgtctttccaaggtttttgttttaaagggacttttaaattgtctaaaatatcagtagaccatcatctgtgccatgggggacagagccaatttcaagtcatggccaaaattttgtaagaggagtgtttttgtgtgttttttaaagtcagtgttccttttttatatctttacaaagaaaagaccttccacggctggtgagcacgcagcctgtgaaattcggggcagctgctccaagttgacttcaccctgggagcagtagtagctgtgcccactgacggccataaaagccattttacagccagttgcactgtgttctcttgtaagcataatcagatgggagaatctgttatttccctgtaaccccttggaattgattctaaggtgatgttcttagcactttagcttgtcaattttgttttagtctccgttatagatgtaagctccaccagtctcttaaggattaagcccagtgacttggagggtgggggttagggtctctatccctgaacattgtagacccaggctggcctgagagatccacctgcctctgcctcctgagtgctgcgatcaaaggcccagcttggttattgcttttgaggctttctcccaacgcacagacttgtgtaattctaacactaatcctgtgaagggttgtggttgacagctggagcctgggtgacattctacattgagatgccccagcactgatcggggcacagaagcccccagaccccatttcctgtccagtgttgggagaaagtgctgctttcactgtggcctcagccctggctcggaagctcactaagccttagcactttgtcctgtgtcagctccacctgagaactgtgcagccagaatgtctgcgagctgatggaggtttcggttttgttgtttttgtattttgtgtatctttttgtatgattaaaaactatattttctacttatccaaatatattttcaccccaaagtggggttatcctttgtaaaaaaaaataaagttttttaatgacaaaaataaa

SEQ ID NO: 151 - DNA, 2764 bp, Mus musculus
  modified_base (1986)..(1986): a, c, g, t, unknown, or other
  modified_base (2180)..(2180): a, c, g, t, unknown, or other
aagccgcacccacactcacgcacacctccagcccgcacacagacgtgcacgcaccccccgccgcccggaagttatgtattctccgctctgtctcacccaggatgagtttcatcctttcattgaagcacttctgccccatgtccgcgccttcgcctacacatggttcaacctgcaggcccgaaagcggaaatacttcaaaaaacatgagaagcgcatgtcgaaagaagaggagagggccgtgaaggatgaactgctaagcgagaagcccgaggtcaagcagaagtgggcttcccgacttctggccaagttacggaaagatatccgacccgagtaccgagaggattttgttcttacagttacagggaaaaaacctccatgctgtgttctttccaaccctgatcagaaaggcaagatgcggagaattgactgcctccgccaggcagataaagtatggaggttggacctcgtcatggtgatcttgttcaaaggtattccgctggaaagtactgatggcgagcgccttgtaaagagtccacagtgctctaatccagggctctgtgtccagccccatcacataggggtttctgtaaaggaactcgatttatatttggcatactttgtacatgcagcagattcaagtcaatctgaaagtcccagccagccaagtgaagctgacattaaggaccagccagaaaatggacatttgggcttccaggacagctttgtcacatcaggtgttttcagtgtgactgagctagtaagagtgtcacaaacaccaatagctgcagggaccggccccaatttttctctctctgatttggaaagttcttcatactacagcatgagtccaggagcaatgaggaggtctctgcccagcacatcctctaccagctctacaaagcgcctcaagtctgtggaggatgaaatggacagtcctggtgaagaaccattttacacaggccaagggcgctccccagggagtggcagccagtccagtggatggcatgaagtagagccaggcttgccatctccaagcacactgaagaagtctgagaagtctggtttcagcagcccctccccttcgcagacctcctccctgggaacagcattcacacagcatcaccgacctgtcattacaggacccagagcaagtccacatgcgacgccatcgactctccactttccaacgtcacccatcatccagcagcctgggccttacttctcacacccagccatccgttaccaccctcaggagacgctgaaagagtttgtccaacttgtctgtcctgatgctggtcagcaagctggacaggtggggttcctcaatcccaatggaagcagtcaaggcaaggtgcacaacccattcctcccaaccccaatgttgccgccgccgccaccaccaccgatggccaggcctgtgcctctgcccatgccagacaccaagcctccaaccacatcaacagaaggaggtgcagcctcccccacctcaccgacctactcgacacccagcacctcccccgcaaaccgattcgtcagtgttggaccacgggatccaagctttgtaaatatccctcaacagacacagtcctggtacctgggataaaagttgcagcatcccaccatcctccagacagaccacctgaccccttctcaactctgtaacatggacggaacctcaacccggcggagttacaacttcactgtcagtggaaggggagcgaaaccaactcggatcaacttatacatggraacagcaaacatcgtggtcaaacagcaaaggccataactttttgggattcttttttttttcttttttcttttttttctttttttttttcttttttaatactttagggactgtcgtaatttctcatggtgctggaaatggttgggctgtgtgacatttgaagtgtttcagtggtggcgtgcgagtaggtgaagtggttggtgaaggatgagcctcgctcgcgaacttcctgtggtacnaacacttgggagcctggccttttcccagtatttcctgaatttgcccgtgcaggtgtgtgaccctccctgagcatctggagacacctggagcatgaaaccttctgtaatcgctgagatctgtaacttacaggacactcaaagggcaatggttttttttggggggggggttgtttttttggttttttttttctgtnaacatattagggaaaaaatgmagtyaagktgrctctytctttacgtttggtttggthcagcagtcagcagttacatacataacacaacccgcaaggacagtgaatccgctcctgttgcagagcaatttccaaaaagacggcaaagactactactatcagtttggttgggttttgttttttgttttttgtttttttgttttttttgttttttttgtycttaagttttgaaatgctgcacttacatttaaaaaaaaaacatttttcaacaatttcaacaatgacacaaaaattcacatgggaaatggggaagatggtctgttttgacagaaactgacaggaatcaaaacaatcgaattttgaattgastgaagtgcaatttcattggatagctaagtatctttgtaagatagagattgttgaaaattctatttttgtttttcaagtcctcccaccccaggactctaaattattggggtaaaaaacagccttgcaagaaaaaggggagctatttttgctttttatgttttttattgttaaacttgtatccctttaaaaaaaaaccgaaggaaaatttaaaaaaacgc

SEQ ID NO: 152 - DNA, 3991 bp, Mus musculus
cccacgcgtccgctggtctgctccgctctgcccgctctcggcttccgggctcgcagactccaccgcccgcctcctgcacctaccaagccggaggaccacgcgcctgctgctgccggcctcccggcctgcccatgatcaccctgtgcctttcggctctgcgaggcctccacagagctggtggttccaggattcggctcagaatgacgttggggagggaggcggcatctcctcttcaggccatgtcttcctacaccgccgcaggcaggaatgttctcagatgggacctttctccagagcagatcaggacgaggacagaggagctcatagcacagaccaagcaggtgtatgataccgtggggacaatcaacctggaggatgtaacttacgagaactgtctgcaggtgctggctgacatagaagtgaagtacatagtggaaaggaccatgctggacttccctcagcacgtgtcgtctgacagagaagtgcgggctgcaagcacagaagcggacaaaaggctttctcgttttgatattgagatgagcatgagagaagatgtatttcagagaattgttcatttacaagaaacgtgcgatttggagaagataaagcctgaggccaggcgatacttggaaaaatcaattaaaatggggaaaaggaatggactccatcttccagaacacgtaaaaaatgaaatcaaatcaatgaagaagagaatgagtgagctatgcattgacttcaacaaaaacctcaatgaggatgacacgtcccttgtattttccaaggctgaacttggtgctcttcccgacgacttcattgacagtttagaaaaaacagatgaagacaagtacaaagttaccttaaagtatccccactattttcctgtcatgaagaaatgctgtgtccctgaaactcgaaggaagatggaaatggcttttcataccaggtgcaaagaggaaaacaccataattctgcaacagctcctgccgctgcgagcacaagtggccaaactgctcggctacaacacccatgctgactttgtccttgaactgaacactgcaaagagcacaagccatgtggcaacctttctagatgatttaagccagaaattaaaacccttgggtgaggctgaacgggagtttattttgagcttgaagaagaaggaatgcgaagagcgaggttttgcatacgacgggaagatcaacgcatgggacctccattactacatgacccagacagaggagctcaagtactctgtggaccaggagtccctcaaggagtactttcccattgaggtggtcactgaaggcctgctaagcatctaccaggagctgttgggactttcatttgaacaagtggctgatgcccatgtttggaataagagtgtttcactttacaccgtgaaggataaagctactggagaagtgctggggcagttctacctggacctctatccaagggaaggaaaatacaaccatgcggcctgctttggtctccagccaggctgccttctccctgatggcagtcggatgatgtctgtggctgccctggtggtcaacttctctcagcccatagcaggccggccctctctcctgagacacgacgaagtgcgaacttacttccatgagtttggtcacgtcatgcatcagatctgtgcacagactgactttgcacgatttagtggaacaaatgtggaaactgactttgtagaggtgccatcacaaatgcttgaaaactgggtgtgggacattgactccctgcgaaaactgtcaaaacattatagagacggacaccctatcacagacgagctgctggagaagcttgtggcttcgagactggtcaacacaggtcttctgacgcttcgccaaattgttttgagcaaagttgaccagtccctccataccaatgcgtcgctggatgccgcgagcgaatacgctaaatactgcacagaaattttgggagttgcagctacgccaggcacaaatatgccagctacctttggacatttggcaggagggtatgacggccagtattatggatatctttggagtgaagtcttttccatggacatgtttcacagctgtttcagaaaagaagggattatgaatccagaggttggaatgaaatacagaaacctaatcctgaagcctggggggtccctggacggcatggacatgctccagaatttcttgcaacgtgagccaaaccagaaagcattcctgatgagtcgaggcctgaatgcttcgtaaagcagggacgctgggggctgtccgtggctggaggacaagccaacaccgtccgccatgtggtgccggcctggagactgaaggcagttttacaaaggaaaacttagatttctattcatttgcttttgtttcttcattttaaaaattatacagatgtaaatggaattataaatactgtgacctaagaaaagacccactaaaaataattgtactataaagtttcataaaaacagatttgatttcttttgataaaagtttcacatgactgtaatttgatttttttactgttataatccagataatataatgtaagagggctaagacattttaaattgaatcacatacatgatataatttgatctttcttatatcttgaagttttatacttgagattcctggactgataagtgaatcagcatgttctctctggtaaatattttctcagagccctgtgtcaaccttgaccctctgcctcacaactaagtgacagtttgcctgtgtgtgtcaaggcccgcaggatacacttcaatgctgtttgtcttttgtagtgagctttgtgattctcggcttctgtcacacttacttacatagctccacttagatttggggttctttcccttctaaaatttaatttctaaagttaatattattatttagataatatttttaaattttgtttcaactggcctagtatataagttttgtgtcttgcactagaagctcaaatgtcaagtcttcggttgcagtcacagtgagagaagcagagaacttaggcatcttttgggttctcgacttttagtatttgctatgtatttgtttctgcttgttttgcttatatatatatattttttttattttgtttgcttgaggcaccatctcaccatggagccagattcgcctggaactcatggtaattcccctgcttcggcctcccaagccttaggggcgcaggtgtgagctgcctcactcagctcagttctcacgtttctaataagactctgaccttgcctccctgaaagtggtaggtcggccctgtagtcacagtgtgttgaagtgccagggggagagatgacatccactggaacttagctttgaaaactccagaaaagagtgcgttggagcagagcgtttgcgaacagctgctcccaagtgttccgtgggcaaccgagctgtgggaaaaggctgtccagcaggctgtttcatatggcgactgttaagtgaacctccagatctccaactccttttattgggacctaagtttccagctcagagtagtgagctcacagcattattttagccttgggagtctactccaaacggaagccaagtaggatagagaggagaaaatgtaaatgagctgtgatcggactttccacagggctttgagttgtttctccacacatacctgaggaatgactttcctggcaggaaacgaaattagagcctgtctgttctttagacccggtggactttgtgttcaataaaatattatgtcgtgtaataaagttatacagagtaccaagagctggtacacagcagggaagccctttgtttatgtagtttgatttgatttttacaaggctgggcatcaaacctccggcttcttcacccatgctagcaagtgctatgctctcccagctgcttttatggtggtggtagaaacctctggaagcgtctcacatctgtccccacccccatttttgtttcctactttcagacaaaaaaaaaaaaaaaaaaaaaaaaaaaaa

SEQ ID NO: 153 - DNA, 2724 bp, Mus musculus
tttggcagtggaggttcctgtgctctccggtcgctggaatcgggaacctcgcccgcttcggttcctggtcgcagagaaaggtgcccgcttggcctctctcgccctcgcgagctcttcatccgtttaagttcctagacgccgttgcgtttgcggaccgatctccgttttcagaagggagccatgtcctcggccgccatgtctaaatacgtgaacgacatgtggcccggctctccgcaggagaaagcctcgccgtccacctcgggctcgggccgctccagccgcctgtcgtcgcgctcccgcagccgctcttcgtcccgcagctcccgacgcgactcccgcagctctagccgctcgtcctcgcgcagccacagccggccgcggaggagcagacggtcccgatcccggtcccgcaggcgccaccagcgcaagtacaggcgctactcacgctcgtactcacgcagccggtcgcgctcccgcagccaccgctatcaccgcgacagccgttacgagcggccgcggaggtactacaagtcgccgtcgccctaccgctcccggagcaggtcgcgctcccgcgggaggtcgcagcaccggtggtcgtactacgcgatcactagagggcggcgctactacggcttcggccggacggtgtaccccgaggatcgccccaggtggagggaaagatccagaaccaggtcgcgcagcaggagtagaaccccatttcgcctgagtgagaaagatcgaatggagctactagaaatagcaaaagccaacgcagcaaaagctctgggaacagccaacttcgacttgccagcaagtctccgagccaaggaggcaagccaggggacagctgtttccagcagtgggccaaaggtggaggtaagtgccttcaggaagctgctgccagcatttattaccctttgccagtgaacacaaccctcctggggttctttatatcatttgtccagaacaaaaccttaatctgacaagtatcagcctgtctcacaggaaactgggagacgatggactactttcgtgtcgacacttggacacttggtttgctctttacactacagtaaaaacagtacattgttggtaatactttctctccctctagtctctagagactggagtgttgtcagtagttttcatgtacaccattatgttcccaagtctgtgctcagcatacagtatagtttatctgctttatttctgtcttatagaaatcatgaatgtggtctccagacagtgatgaagaaaatctgttggtaattgatgatgggttcaagtgtcagagtttatgtttacagactaaagcttagccattgttgaagggagttggtgtgcatgctagagttttgggctagggactgtttgtgtaaggcagtgacagctcagcagcctagaggcactgtcatggtgggcatctgtgatctagacgtccttcacatgatatatgcaatatattccagatgttttgagagattacagaagaagaggcctgcttcccttgcagataagtttattacgattctccagaactacagagggtgtgcattggcacactgcagtatataagttaaacctggatcttaaggttaataatttgggctgggatgtaactcagttgtagagaactttgtcagggtgcatagtacctggggttagctcccagcactgtgtagactgggtttagtaccccgctcctatgatcccagcacttgggaggctgtccttggacagctaggggatagatacaagagacttggtctcagaaactgctttatagaaacataaggtaaaaaataactataatgaaggtggtttgtctgtccattgctgagacctcaggggctgcctggtctttgctcaggcaaagaggggctccttgatgagtggattgcaaaagcctcacttctttagatgaagcattttttattgtacttactcaaaatgaggtatatctacaacaggagtcgggtattcgtggggaactgcgcctcccaagtcattctggctaattggaaaacaggctttttttgttgattagctctttaactgtgacaatagatggaatttggtttgtgtatctacagctacatttgtgtacgttgggctttttttttttaaatacaatattttaaaagttaaggctatgtttaaaattctcttcctctttagcattcagaaaagcagactgaagatgcaactaaaaataccagtgaaaagtcttctacacaaagaaacatagccttcagctccaataattccgtagcaaagccactgcagaaaacaactaaagctgctgttgaagagaagtcttcaggatcaccaaaaatagataagaaaaaaagtccttacggactgtggatacctgtctaaaggaaaactaagggctggggttgccaaaactgcactttactgaggggtttgtgtccagcattagatcgtctgcctgagtgatcacagcagtaaatgtgattaaaatccattacagaaagagacttaatggggacgttcatggttgaggtttctcttgaagataggaggacacagatgacccagagaattgcatacaggtgggaatcttgtatatatctgtaagtattgtatagaattgcttatatacaaaggtgaattttttaaagacacagttgtacactgaattttgtatatttgttaataaactttttattatttgtcttgataaaaaaaaaaaaaaaaaaa

SEQ ID NO: 154 - DNA, 1846 bp, Mus musculus
aggcaccatggcagcagcgttccgcagaggctgcagggtcctgagaagtgtttctcattttgagtgtcgaacacaacactcgaaagcggctcacaagcaggagcccggattagggtttagttttgagttgacggaacagcagaaagagtttcaagcaactgcccgcaagtttgccagagaggagattatccccgtcgccccggaatatgacaaaagcggggagtacccgttccctctcatcaaaagagcctgggaactcggcttgatcaacgcgcacattccggaaagctgcggtggccttggcctgggaacgttcgatgcttgtttaattaccgaagagttggcgtatgggtgtacaggggtgcaaactgctattgaagcaaattctttggggcaaatgcctgtgattcttgctggaaatgatcaacaaaaaaagaagtatttggggaggatgacggagcagccaatgatgtgtgcttactgtgtgacagagccctccgcaggctctgatgtggcggccattaagaccaaagcagagaagaagggtgacgagtatgttatcaacggccagaagatgtggataaccaacgggggaaaggccaactggtatttcttgttggcacgttctaacccagatcctaaagtacccgctagtaaagcctttactggattcattgtggaagccgacaccccgggaatacatattggaaaaaaggaactaaacatgggccagcgatgctctgacaccagaggaattgctttcgaagacgtcagagtgcctaaggaaaatgtgttaatcggtgaaggagcaggtttcaagatcgcaatgggtgcttttgatagaaccagacctacagtcgcagctggcgctgtcgggctagcccagagagctctagacgaagccacgaagtatgccctggataggaagacatttggaaagctgctagtggagcaccaaggagtttcatttctgctcgcagaaatggcgatgaaggttgaactcgctaggctcagttaccagagagcagcctgggaggttgactccggtcgccggaacacttactatgcctcgattgcaaaggcctttgctggagacattgccaatcagctagccactgacgccgttcagattttcggaggctatggattcaacacagagtaccctgtggagaagctgatgagggacgccaagatctatcagatttatgaaggtactgcacaaattcagaggctgatcatagctcgtgagcacattgaaaagtataaaaattaacaggaattactattgaacgatgcatcaccctcgtgtaactaagctccaagcactgttgctgcttcaggggaaaagggctttactgtcttcccaaggaaatgagatcaaagacgagtttggatctgtgcagcggattcccatggcggaggaacctgtcttcagctctatggtgaccctttctagataggtttggcttttggacaatgattggtccttagccccgaattgtgttagtttgctctttgatcacttaaaatggaaaaacaccctggacttttaatgttcattcaagtgacaggaaaggcggcttgtcaaggaagaactcatgattctaacataaacactgaaaatttgtggtagattggacacgtcagactgtgacatagcagcatttctgtgctgaactgttaattttataattttgttatatttgctttgttttgcacaaaagagtaaaaagtttatattcatattctcccattataaaactaaaacttttctgggaatcttagtactgaacgagaattttatttgtcttgtttaaaataattcaataaagctaaccttaactcc

SEQ ID NO: 155 - DNA, 3363 bp, Mus musculus
ttttgcaacattaaattgtgtcagccaagcaaatgcagccctatttataaaattgcttgcttctggtttcactttattgcatcgtgggctccgagagggagaaaaatgaagtttttgctgcttagcacatttatatttttgtatagttccttagccttggcaagagataagcattatttcattggaattactgaagcagtatgggactatgcttctggcactgaagaaaagaaacttatttcagttgacacggaacagtccaatttctatcttcaaaatggtccagatcgtattggaaggaaatataagaaggccctttattttgagtacacagatggcacctttagtaagactatagacaaaccagcctggctagggtttttaggccctgtcatcaaagctgaagttgaagataaagtttatgttcacttaaagaaccttgcctctaggatctacacttttcatgcacatggggtaacgtacaccaaggagtatgagggagccgtctaccctgataacaccactgattttcaacgggctgatgacaaagtgcttcccggacaacagtatgtgtatgtgctgcatgccaatgagccaagtcctggagagggagacagcaattgtgtgaccaggatttaccactcccatgttgatgctccaaaagatattgcatcaggactcataggacctctaatactctgtaaaaaaggttctctatataaggaaaaagagaaaaatattgaccaagaatttgtactaatgttctctgtggtggatgaaaatctcagctggtatctggaagataacatcaaaaccttctgctctgaacccgagaaagttgataaagacaatgaagacttccaggaaagcaacaggatgtactctataaatggatatacatttggaagcctcccagggctctcgatgtgtgcagcagacagagtgaagtggtacctttttggtatgggtaatgaagttgatgtgcattcagctttctttcatggccaagccctgaccagcaggaactatcaaaccgatataatcaacctgttccctgccaccctaattgatgcttatatggtggcccagaatcctggagtctggatgctcagttgccagaacctaaaccatctgaaagctgggttgcaagcctttttccaggtccaggactgtaacaagccttcatcaaaggataatatccgtgggaagcatgttagacactattacattgctgccgaggaagtcatctggaattatgctccctctggtatagacatcttcactgaagaaaaattaacagcctctggaagtgattcaggggtattttttgagcaaggtgccacaagaattggtggctcttataaaaaaatggcatatcgtgagtacacagatggttccttcacaaaccgaaaagagagaggccctgatgaggaacatcttggaatcctaggtcctgtcatttgggcagaagtaggagacaccattaaagtcacctttcataacaaaggacagcatcatctcagcattcagccaatgggagtaagtttcactgcagaaaatgagggaacatactatggcccaccaggtgcgtcctcacagcaagcagcctcccatgtggctcccaaahaaacctttacatacgaatggactgtccccaaagaaatgggacccacttatgcagatcctgtgtgcctatctaagatgtactactctgccgttgaccccaccaaagatatatttactgggcttattgggccaatgaaaatatgcaagaaaggcagcttacttgctgatgggagacagaaagatgtagacaaagagttctacttgtttcccacagtgtttgatgagaatgagagtttactcttagatgataatatcaggatgttcacacatgcacctgatcaggtggataaggaagatgaagactttcaggagtctaataagatgcactccatgaatgggttcatgtatggcaatcagtcctggcctcatatgtgtctaggagaatccatcgtgtggtatttgttcagcgctggaaatgaggctgatgtgcatgggatatacttttcaggaaatacttatctgtgtaaaggagaagagagagacactgcaaacctattccctcataaaagtctcacccttctcatgaaccctgacacaaaagggacttttgatgttgagtgccttacaacggatcactacacaggtggcatgaagcaaaaatacactgtgaaccagtgccagcggcagtttgaagatttcactgtctaccttggagaaaggacctactatgtggacgccgtagaggtggaatgggattactcaccaagcagggcctgggaaaaggagctgcatcatttgcaagagcaaaatgtttcaaatgtatttttggataaagaagagtttttcataggctcaaagtacaagaaggttgtgtatcgccagtttactgacagctcattcagagaacaggtgaagagacgagccgaagaagacgagcacttgggcatccttggcccaccaattcatgcaaatgttggagacaaagttaaagttgtctttaaaaatatggcaaccaggccatattcaatacatgcccatggggtgaaaacagagagttctacagttgttccaacgttaccaggtgaagttgcaacttatacatggcaaattccagaaagatcaggggctggaagagaggattcagcttgtatcccatgggcttattactcaactgtggatcgagttaaggacctctatagtgggctaataggcccattgattgtttgtcggaagtcttatgtgaaagtattcagtcctaaaaagaaaatggagtttttccttctgtttctagtatttgatgagaatgaatcttggtacttagatgataacatcaaaacatactctgaacaccctgagaaagtaaacaaagacaacgaggaattcctagaaagcaataaaatgcatgctattaatgggaaaatgtttggaaacctacaaggcctcacaatgcacgtgaaagatgaagtcaactggtatctgatgggaatgggcaatgaaatagacctgcacactgtacacttccacggccacagcttccaatacaagcacaggggagtatacagttctgatgtctttgaccttttccctggaacataccaaaccttagaaatgtttccccaaacacctggaacctggttactccactgccacgtgactgaccatgtccatgctgggatggcaactacctacactgttttaccagtagaacaagagactaagtctggctgaatgaaataaattggcgataagtggaaaacgagaacaatgagtcatttcaaacatttcaaaaaaaactcg

SEQ ID NO: 156 - DNA, 3775 bp, Mus musculus
atgcctcacttcaccgtggtgccggtggacgggccgcgacgcggcgactatgacaacctcgaggggctcagttgggtggactacggcgagcgcgccgagcgggaagactcggacggacagggtaaccacagagagaatagccctttcctttgccctttggacgcctccagaggaaatgactactatgaccggaacttggcactgtttgaggaggagctggacatccgcccaaaggtgtcatctctcctgggcaagcttgtcagctataccaacctcacccaaggagccaaggagcacgaggaggctgagagtggagaaggtggccgacggagagctgccaaggctcccagcatgggcacactcatgggagtgtacctgccctgcctgcagaatatctttggggtcatcctcttcctgcggctgacctggatggtgggcacagctggtgtgctgcaggctctcctcattgtcctcatctgctgctgctgtaccctgctgacagccatctccatgagcgccattgccaccaacggcgtggttccagctggtggctcgtacttcatgatttcccgctctttgggaccagaattcggaggtgctgtgggcctgtgcttctacctggggacgacatttgcagcagccatgtatatcctaggggccattgagatcttgctgacctacattgctccgccagctgccatcttttacccatcgggcacccatgacatgtcaagcgccaccttgaataacatgagagtgtatgggaccattttcctgactctgatgaccctagtggtgtttgtcggtgtcaagtacgtgaacaagtttgcctcgctcttcctggcctgcgtgatcatctccatcctttccatttacgcgggaggcatcaagtccatttttgaccctcccgtgtttccggtgtgtatgctgggcaataggaccctgtctcgggaccagtttgacatctgtgccaagacagtcgtggtggacaatgagacagtggccacccggctgtggactttcttctgccacagccccaaccttactgctgactcctgtgacccctacttcctgctcaacaatgtgacagagattcctggcatacctggggcagctgctggtgtgctccaggagaacctctggagcgcttacctggagaagggggaggtcgtggagaagcatgggctgccgtccacagacaccctcggcctaaaggagagcctgtccctgtatgtggtggctgacatcgccacgtccttcaccgtgctggttggcatctttttcccttctgtgacaggcatcatggctggttcaaaccgctccggggatctccgtgacgcccagaagtctatcccagtggggaccattctggccattgttaccacttcgctggtgtacttcagcagtgtgatcctcttcggtgcctgcatcgagggtgtggtactccgggacaagtacggtgatggcgtcagcaggaacctggtggtgggcaccctggcctggccttcgccttgggtcatcgtggttggctccttcttctcaacatgtggggctggtctccagagcctcactggggcgccacgtttactgcaagccattgccaaggataacatcatccccttcctccgggtgtttggccatgggaaagcaaacggtgaaccgacgtgggccctcctcctgacagcgctcatcgctgagctgggcatcctgattgcttcccttgacatggtggcccccattctgtccatgttctttctgatgtgttacctctttgtaaacttggcctgtgccgtgcagacacttctgaggacccccaactggcggccccggttcaagtactatcactggacattgtctttcctaggcatgagtctctgcctggctcttatgtttgtctcctcctggtactatgccctagtggccatgctcatcgcaggcatgatctacaagtacatcgagtaccaaggggccgagaaggagtggggcgatgggatccgaggcctgtccctgagtgcggcacgctatgcactgctgaggctggaggaagggcctcctcacaccaagaactggcggcctcagctcctggtgctgcttaagttagacgaagatcttcatgtgaagtacccccggctcctcaccttcgcctcccagctgaaggccgggaagggcctgacaatcgttggctctgtcatccagggcagctttctggagagctatggtgaagcccaggccgctgagcagaccatcaagaacatgatggacattgagaaagtcaaaggcttctgccaggtagtggtggccagcaaggttcgagagggactggcccacctcatccagtcttgcggcctgggcggcatgagacacaactccgtggtgctgggctggccctatggctggcgacagagtgaggacccacgtgcctggaagacctttattgacactgtgcgctgcaccacagctgcccacctggccctgctggtgccaaagaacatagctttctaccccagcaaccacgagcgctacctggatggccatatcgacgtgtggtggatcgtgcatgatggaggcatgcttatgctgctgccctttctgctgcgccagcataaggtttggaagaagtgccggatgcgcattttcaccgtggcccagatggatgacaacagcatccagatgaagaaggatctggccatcttcctgtatcacctccgcctggaagctgaagtggaggtggtagagatgcacaacagtgacatctctgcctatacctatgagcggacactgatgatggagcagcggtctcagatgctgcggcagatgaggttgaccaaaactgagcgggatcgagaggcccagctggtaaaggacaggcactcggctcttaggctggagagcctctactccgacgaggaggaagagtctgtggcaggggccgacaagatccagatgacgtggaccagagacaagtacatggctgagccctgggaccccagccacgcccctgacaacttccgggagctggtgcacattaagccggaccagtccaacgtgcggcgcatgcacactgctgtgaagctcaacgaggtcattgtcacgcgctcccacgatgcccgtctggttttgctgaacatgcctggcccccctaagaacagcgagggcgacgagaactacatggaattccttgaagtcctaaccgagggccttgaacgggtgttgttggtgcgtggcggcggccgggaagtcatcaccatctattcctgagccccgatggagtcttgtggcctggagttggggtgtctaggacaacagtgcccggccttgcacctacttgccagttctgctttgcccagccttgctttggaccagctctgctacgtctccagggaaaccaagcttgggccttgcagtggaaatggatccgagggcccaggggaccctggtggatttagggactgtcccctcccatactccaatagaggcctatcctgactagagaagactggtgagggttgatacgggatttgaattcccagatgggcccacaagtgctatttattgtatatttattgtttggatgtcatcatttcagaaacgggaagaggggcacagtaagagggggagctgagctgggcctgcctgcaggaagacctggcccaggctgctgtgggcagaggcctcatcaagccaagtggaatggagccggccaagctgagcctgacttttttcaataaaacattgtgtacttctggaaaaaaaaaaaaaaaaaaaaaaaaaaaaa

SEQ ID NO: 157 - DNA, 8964 bp, Mus musculus
aagttctaagaagccggaccgatgtgcacagagaaggaatgaaggaagtatggatgtgaaggaacgcaggccttactgctccttgaccaagagcagacgggaaaaggaaaggcgctatacaaattcgtccgcggacaatgaggagtgtagggtccccacgcagaagtcctatagttccagtgaaaccttgaaagctttcgatcatgattattcacggctgctttatggaaacagagtaaaggatttggtccacagagaagccgacgagtatactagacaaggacagaattttaccctaaggcagttaggagtgtgtgaatccgcaactcgaagaggagtggcattctgtgcggaaatggggctccctcacagaggttactccatcagtgcagggtcagatgcggatacggaaaacgaagcagtgatgtcccctgagcatgccatgagactttggggcaggggggtcaaatcgggccgcagttcctgcctgtcaagccggtccaactccgccctcaccctgacagacacggagcacgagaacaggtcggacagtgagagcgagcaaccttcaaacaacccagggcaacccaccctgcagcctttgccgccatcccacaagcagcacccggcgcagcatcacccgtccatcacttccctcaatagaaactccctgaccaatagaaggaaccagagtccggccccgccggctgctttgcccgccgagctgcaaaccacacccgagtccgtccagctgcaggacagctgggtccttggcagtaatgtaccactggaaagcaggcatttcctattcaaaacagggacagggacgacgccactgttcagtacggcaaccccgggatacacaatggcatctggctctgtttattctccgcctacccggccacttcctagaaacaccctatcaagaagtgcttttaaattcaagaagtcttcaaagtactgcagctggaggtgcaccgcactgtgtgctgtaggggtctcagtgctcctggccattctcctctcctattttatagcaatgcatctatttggcctcaactggcacttacagcagacggaaaatgacacattcgagaatggaaaagtgaattctgacaccgtgccaacaaacactgtatcgttaccttctggcgacaatggaaaattaggtggatttacacatgaaaataacaccatagattccggagaacttgatattggccggagagcaattcaagaggttccccccgggatcttctggagatcgcagctctttattgatcagccacagtttcttaagttcaacatctctcttcagaaggatgcattgatcggagtgtacggccggaagggcttaccgccttcccatactcagtacgactttgtggaactactggatggtagcaggttaattgcgagagagcagcggaacctggtggagtccgaaagagccgggcggcaggcgagatctgtcagcctgcacgaagctggcttcatccagtacttggattctggaatctggcatctggctttttataacgacgggaaaaacccagagcaggtctcctttaacacgatcgttatagagtctgtggtggaatgcccccgaaattgccatggaaatggagagtgtgtttctggaacttgccattgtttccccgggtttctaggtccggattgttcaagagcagcctgtccggtgctctgtagtggcaacgggcaatactccaagggccgctgcctgtgcttcagtggctggaagggcaccgagtgtgacgtgccgacgacccagtgcattgacccgcagtgcgggggtcgtgggatttgcatcatgggctcttgcgcttgtaactcgggatacaaaggagaaaactgtgaggaagcggactgtctagaccctggatgttctaatcacggggtgtgtatccatggggaatgtcactgcaatccaggctggggtggcagcaactgtgaaatactgaagactatgtgtgcagaccagtgctcaggccacgggacttaccttcaagaaagcggctcctgcacttgcgacccaaattggactggccccgactgctcaaatgaaatatgttcagtggactgcggctcacacggcgtctgcatggggggctcctgtcgctgtgaagaaggctggaccggcccggcgtgtaatcagagagcttgccaccctcgctgtgctgagcacgggacgtgcaaggacggcaagtgcgagtgcagccaaggatggaacggagagcactgcacaattgctcactatttggataagatagttaaagagggttgccccggcttgtgcaacagcaatgggagatgcacactggaccaaaacggctggcactgcgtttgccagccagggtggagaggagcaggctgtgacgtagccatggagaccctctgtacagacagcaaagacaacgaaggagacggactcattgactgcatggatcctgattgctgcctccagagctcctgccaaaaccagccctactgtcgtggcttgcctgatcctcaggatatcattagccaaagccttcagacaccatctcagcaagctgccaagtccttctatgaccgaatcagtttcctgattggatcggatagcacccacgtgctccctggagaaagtccgttcaataagagtcttgcgtccgtcatcagaggccaagtactaacagctgatggaaccccacttattggcgtcaacgtgtcgtttttacactactcggaatatggatataccattacccgccaggatggaatgtttgacttggtggcaaatggtggcgcttctctgactttggtatttgagcgttccccattcctcactcagtaccacactgtgtggattccctggaatgtcttttatgtgatggatacccttgtcatgaagaaagaggagaacgacattcccagctgtgacctcagtggctttgtgaggccaagtcccatcattgtgtcttcaccgttatccaccttcttcaggtcttcccctgaggacagccccatcatccccgagacacaggtcctgcatgaagaaaccacaattccaggaacagatttgaaactttcctacctgagttccagagcggcagggtacaagtcagttcttaagattaccatgacccaggccgtcataccgtttaacctcatgaaggtccatctgatggtggccgtggttgggagactcttccagaagtggtttcctgcctcgccaaacttggcctacacgttcatctgggataagacggacgcatataatcagaaagtctacggcttgtcagaggcagttgtgtccgtcggatacgagtacgagtcgtgcttggacctgactctctgggaaaagaggactgccgttttgcaaggctatgagttggatgcttcgaacatgggcggctggacgttggacaagcaccatgtactggacgttcagaacggtatactatacaaaggaaatggagaaaatcagttcatctctcagcagcctccggtggtcagcagcatcatgggtaatggtcggaggcgtagcatctcatgcccaagttgcaatggtcaagctgacgggaacaaactcctggcacccgtggcgcttgcctgtgggatcgacggcagtctatacgtaggggatttcaattacgtccggcggatattcccgtctgggaatgtgacaagtgttttagaactaagaaataaagattttagacatagtagcaacccagctcacagatactacctggctacggacccagtcaccggagatttgtacgtctctgatactaacacccgcagaatctatcggccgaaatcactcacgggagccaaagacctgactaaaaacgctgaagtggtggcagggaccggggaacagtgccttccctttgacgaggccaggtgtggggatggaggcaaggctgtggaagcaacgctcatgagtcccaaaggaatggcaatcgataagaacggactgatctactttgttgatggaaccatgatcagaaaggttgatcaaaatggaatcatatcaactctcctgggctccaacgacctcacgtcagctcgacctttaacctgtgatactagcatgcatatcagccaggtgcgtctggaatggcccactgacctcgcgatcaaccccatggataactccatctacgtcctggataataacgtagttttacagatcactgaaaaccgtcaggtccgcatcgctgccgggcggcccatgcactgtcaggtccctggagtggaatacccggtggggaagcacgcggttcagaccaccctggagtcagccacggccattgctgtgtcctacagcggggtcctttacatcacggaaactgatgagaagaagatcaaccgaataaggcaggtcacgacagacggggagatctccttagtggctgggataccttcggaatgtgactgcaagaacgacgccaactgtgactgctaccaaagcggagacggctacgccaaagatgccaaactcaatgcgccgtcctccctggccgcctcgccagatggcactctgtacattgcagatctgggaaatatcaggatccgggccgtttcgaagaataaacctttactgaactcaatgaacttttacgaagttgcctctccaactgatcaagagctctacatctttgacatcaacggtactcaccagtacaccgtgagcctggtcacgggtgactacctatataattttagttacagcaatgacaatgacgtcaccgctgtaactgacagcaatggcaacaccctccgaatccgaagggatccgaatcggatgccggtgcgggtggtgtctcctgataaccaggtgatatggttgaccataggcaccaacgggtgtctgaaaagcatgaccgctcagggcctggaactggttttgtttacttaccatggcaacagtgggcttttagccaccaaaagtgacgaaactggatggacaacattttttgactatgacagtgaaggtcgcctgacgaatgttaccttccccactggggtggttacaaacctgcacggggacatggacaaggctatcacggtggacatcgagtcatccagcagagaggaagatgtcagcatcacttcgaacttgtcctccatcgattccttctacaccatggtccaagaccagttaagaaacagttaccagattgggtatgatggctcccttagaatcttctatgccagtggtctggactctcactaccagacagagccccacgttctggctggcacggcgaatcccacagtagccaaaagaaacatgactcttcccggtgagaacgggcagaatctggtggagtggagattccgaaaagaacaagcccagggcaaagtcaacgtattcggccggaagctcagggtcaatgggcgcaacctactctcagtggactttgatcggaccaccaagacggaaaagatctatgatgaccaccggaaatttctcctgaggatcgcttacgacacgtcggggcacccgactctctggctgccgagtagcaagctaatggcagtgaacgtcacctactcatccaccggtcaaattgccagcatccagagagggaccacgagcgaaaaggtggactatgacagccaggggaggatcgtatctcgggtctttgccgatgggaaaacatggagttacacgtacttggaaaagtccatggttcttctgctccatagccagcggcagtacatcttcgaatacgacatgtgggaccgcctgtccgccatcaccatgcccagtgtggctcgccacaccatgcagaccatccggtccattggctactaccgcaacatctacaatcccccagaaagcaatgcctctatcatcaccgactacaacgaggaagggctgcttctgcaaacagctttcctgggaacgagtcggagggtcttattcaagtatagaaggcagaccaggctatcagaaattttatacgacagcacaagagtcagttttacctacgacgaaacagcgggagtcctgaaaacagtaaaccttcagagtgatggttttatttgcaccattagatacaggcaaattggtcccctgattgacagacagattttccgcttcagcgaggatggaatggtaaatgcgagatttgactatagctacgacaacagctttcgagtgaccagcatgcagggtgtcatcaatgaaacaccactgcccattgatctataccagtttgatgacatctctggcaaagtcgagcagtttggaaaattcggagtgatatactacgacatcaaccaaatcatttccacggccgtgatgacttatacaaagcactttgatgctcatgggcgcatcaaggagatccaatatgagatatttaggtcactcatgtactggattacaattcaatatgataatatgggccgggtaaccaagagagagattaaaattgggccttttgccaacactaccaaatacgcgtacgagtacgacgtcgatggacagctccaaacagtttacctaaacgaaaagatcatgtggcggtacaactacgacctaaatggaaacctccacttgctcaaccccagcagcagcgcccgcctgacccctctgcgctatgacctgcgcgacagaatcacccgcctgggcgatgttcagtaccggctggatgaagatggtttcctgcgtcagaggggcactgaaatttttgaatacagctccaaagggcttctgactcgagtctacagtaaaggcagtggctggacagtgatctatcggtacgacggcctgggaagacgtgtttctagcaaaaccagcctgggacagcaccttcagtttttctacgccgacctgacataccccacgagaattactcacgtctacaaccattccagttcagaaatcacctccctgtactatgacctccaaggacatctcttcgccatggagatcagcagtggggatgagttctacatcgcctcggacaacacggggacaccgctggctgttttcagcagcaacgggctcatgctgaaacagacccagtacactgcctatggtgagatctactttgactccaacgtcgactttcagctggtaattggattccacgggggcttgtatgacccgctcaccaaactaatccactttggagaaagagattatgacattttggcgggaagatggaccacaccggacattgaaatctggaaaaggatcggaaaggaccctgctccttttaacctgtatatgtttcggaataacaaccccgcgagcaaaatccatgatgtgaaagattacatcacggatgttaacagctggctggtgacgtttggcttccatctgcacaatgctattcctggattccctgttcccaaatttgatttaactgagccttcctatgagcttgtgaagagtcaacagtgggaagatgtgccgcccatctttggagttcagcagcaagtggcaaggcaagccaaggccttcttgtccctggggaagatggccgaggtgcaggtgagccgacgcaaagctggcgccgagcagtcgtggctgtggttcgccacggtcaagtcgctcatcggcaagggcgtcatgctggccgtgagccaaggccgcgtgcagaccaacgtgctcaacatcgccaacgaggactgcatcaaggtggcggcggtgctcaacaacgccttctacctggagaacctgcacttcaccatcgagggcaaggacacacactacttcatcaagaccaccacacccgagagcgacctgggcacactgcggctgacgagcggtcgcaaggccctggagaacgggatcaacgtgaccgtgtctcagtccaccacggtggtgaacggcaggactcgcaggttcgccgacgtggagatgcagttcggtgccctggcactgcatgtgcgctatggcatgacgctggacgaggagaaggcgcgcattctggagcaggcgcgccagcgcgcgctcgcccgggcgtgggcacgggagcagcagcgcgtgcgcgacggcgaggagggtgcgcgcctctggacggagggtgagaaacggcagctgctgagcgctggcaaggtgcagggctacgatgggtactacgtactgtcggtggagcagtaccccgagctggctgacagtgccaacaacatccagttcttgcgacaaagtgagatcggcaagaggtaacccccgggccacccctgtgcagattctcctgtagcacaatccaaaccggactctccaaagagccttccaaaatgacactgctctgcagacagacacatcgcagatacacacgcaacacaaaccagaaacaaagacaacttttttttttttctgaatgaccttaaaggtgatcggctttaaagaatatgtttacatacgcatatcgctgcactcaattggactggaagtatgagaaaggaaaaaaaagcattaaaaaaggcaacgttttgccatgacccctctgtaccttcgaggcactgtatttaacaaaggttttaaaaaggaaaaaaaaatgcgtacaatgtttccagatattactgaattgtcgacctttgcttacaggaagtaatctctacttaggatgtgatatatatagatctgttcattttaaaatgtggggcaaagttactgtttatagaacccaactgctttcccgtgctgctttgtaaaaggacactggcacaagggacgtctgcttcggcggggatttaataatggattttactaacatggcttgccctgggagggaaaaactgacgaatagaatccttgtcactgataagcaaaggaaaccctgatttttttgtaaattatgtgagacaagttgtttatggatttttatatgaattacaatttactgtacatcaaatattagtctcagaggagttaatttatgtaaagtgtttaaaaagtttatacttaaaaataaaatgataaaaacaaaaaaa

SEQ ID NO: 158 - DNA, 2008 bp, Mus musculus
cctgccagcggacatcacacagcctcggactgcggagcccgcatcgcagacgtcaggcgttgcagcaggcggatcgacggcagacgcccacccagcgcccagtgcagccaagatcccgcaatgactctgaataatgtcaccatgcgccaaggcactgtgggcatgcagccacagcagcgctggagtatccctgctgatgccaggcatctgatggtccagaaggatccccacccctgcaacctccgaaaccgccactctactgctccggaagagcactgccggcggagctggtcgtccgactccacagactcggtcatctcttctgagtctggaaacacctactaccgagtagtgcttataggggagcaaggagtgggcaagtccaccctggccaacatctttgcaggtgtgcatgacagcatggacagcgactgtgaggtcttgggagaagatacatatgagcgtaccctggtcgttgacggagagagtgcaaccattatcctcctggacatgtgggaaaataagggggagaacgaatggctccatgaccactgcatgcaggtcggggatgcctatctgatcgtctactctatcacagaccgtgcaagcttcgagaaggcatctgagctgaggattcagctccgcagggcccggcagacagaagacattcctataattttggttggcaacaaaagcgacttagtgcggtgtcgagaagtgtctgtgtcagaagggagagcttgtgctgtggtgttcgactgcaaattcatcgagacctctgcggctgtgcagcacaacgtgaaggaactgtttgagggcattgtgcgacaggtgcgcctgcgcagggacagcaaggagaagaatgagaggaggctggcctaccagaagaggcgggagagcattcccaggaaagccaggcgcttctggggcaaaattgtggccaaaaacaacaagaacatggctttcaagctcaagtcaaaatcctgccatgacctgtcttggctctaggcacccagtgtcacccagatgtccccttggtggacatcgttgaaggctattgggaccagtgatctatattagattggatacataagcattgttagacgcaacttcccctatggcagatggaaaccaacaggttagccttgtgggcaaccaagtgcacgggcaatgaatgagctctgtcaagagtcagtatttattcataggaagcttgacctgctacgtggatgtctcagactcatttaagacacgcttcgggttcacatgagtttctctctcctttggacagcagaatatttttttcctcagtgttgttccatgtgatttcgaggtccttgggtcatatagaaatgtaggaaatggtggtagtttattggaagagaagggctcactgcatacttatatccctgaaacgacatctttagagctggcctcatcacagttgtgactatttctgctccagtgaagagaattgttagaatttgctggaaactgaggcttactaacagtttttgtttaaagaccacagagatttgtagacttaggagctgatatgtgtactacttataggttcaaaaaattgtttacttatgtgtcgtagaagtgtttattttgaggaaactatttttttttttgccaaattctacttagtcaaatcatcttctatgtcttgctgttttttaaatcattaagctatcataaaatattttttaaaaaaatctcaactatattgataacctgcagcgcaaaattttaaatatagtcctgtttttcccccaaaacataaacatgccccatcctttgggttgcttcttgtatgccacagctgaattatatttattattttgcaaataaccattttaatatttgataaagcatatttatgagcatatttcttactgagaaaatgtctgttttattacctttttatatttttcaaagtattcaagtttttacctatatgtcttataataaaataaataaaatctttgaaaaggaaaaaaaa

SEQ ID NO: 159 - DNA, 1500 bp, Mus musculus
gcccgttgccaggcgccgccttataaacctcccgctcggccgccgccgcgccgagtccgagccgcgcacgggaccgggacgcagcggagcccgcgggccccgcgttcatgcaccgcctgctggcctgggacgcagcatgcctcccgccgccgcccgccgcctttagacccatggaagtggccaacttctactacgagcccgactgcctggcctacggggccaaggcggcccgcgccgcgccgcgcgcccccgccgccgagccggccattggcgagcacgagcgcgccatcgacttcagcccctacctggagccgctcgcgcccgccgcggacttcgccgcgcccgcgcccgcgcaccacgacttcctctccgacctcttcgccgacgactacggcgccaagccgagcaagaagccggccgactacggttacgtgagcctcggccgcgcgggcgccaaggccgcgccgcccgcctgcttcccgccgccgcctcccgcggcgctcaaggcggagccgggcttcgaacccgcggactgcaagcgcgcggacgacgcgcccgccatggcggccggtttcccgttcgccctgcgcgcctacctgggctaccaggcgacgccgagcggcagcagcggcagcctgtccacgtcgtcgtcgtccagcccgcccggcacgccgagccccgccgacgccaaggccgcgcccgccgcctgcttcgcggggccgccggccgcgcccgccaaggccaaggccaagaagacggtggacaagctgagcgacgagtacaagatgcggcgcgagcgcaacaacatcgcggtgcgcaagagccgcgacaaggccaagatgcgcaacctggagacgcagcacaaggtgctggagctgacggcggagaacgagcggctgcagaagaaggtggagcagctgtcgcgagagctcagcaccctgcggaacttgttcaagcagctgcccgagccgctgctggcctcggcgggccactgctagcgcggcgcggtggcgtggggggcgccgcggccaccgtgcgccctgccccgcgcgctccggccccgcgcgcgcgcccggaccaccgtgcgtgccctgcgcgcacctgcacctgcaccgaggggacaccgcgggcacaccgcgggcacgcgcggcgcacgcacctgcacagcgcaccgggtttcgggacttgatgcaatccggatcaaacgtggctgagcgcgtgtggacacgggactacgcaacacacgtgtaactgtctagccgggccctgagtaatcaccttaaagatgttcctgcggggttgttgatgtttttggttttgtttttgttttttgttttgttttgtttttttttttggtcttattattttttttgtattatataaaaaagttctatttctatgagaaaagaggcgtatgtatatttgagaaccttttccgtttcgagcattaaagtgaagacattttaataaacttttttgggagaatgtttaaaagccaaa

SEQ ID NO: 160 - DNA, 1185 bp, Mus musculus
cctagatcagctcagggttccagtcagacacctagttctgctctcctctaggactccacaaagagttaatgtccctggggctaagcctaggaagattccagtccctgcccaggcccaagatagttgctggctcaattcccctggcatgcgagactggagaggaggaggggcccaccagcagctgcttgggattccaggctccatcctagctccagagaacaaggatggggtgggtgccactgggtgtggacagagagctagtgaaacaagaccatgacaagtcaccggtcagctcagccctgcctgtgtttctcttttcttagctcagtgagtaccgggtatgtgtcaccctgccaaatccctgatcacaagtctccatgaactggcggtgagctgggataataaaacccctgacctcaccattccagaagcttcagaagactgcatatataaggggccggctggagctgctgctgaaggagttgaccagccaaccgactctgcattcatctagccacaatggacatcgccatccaccacccctggatccggcgccccttcttccccttccactccccaagccgcctcttcgaccagttcttcggagagcacctgttggagtctgacctcttctcaacagccacttccctgagccccttctaccttcggccaccctccttcctgcgggcacccagctggattgacaccggactctcagagatgcgtttggagaaggacagattctctgtgaatctggacgtgaagcacttctctccggaggaactcaaagtcaaggttctgggggacgtgattgaggtccacggcaagcacgaagaacgccaggacgaacatggcttcatctccagggagttccacaggaagtaccggatcccagccgatgtggatcctctcaccatcacttcatccctgtcatctgatggagtcctcactgtgaatggaccaaggaaacaggtgtctggccctgagcgcaccattcccatcacccgtgaagagaagcctgctgtcgccgcagcccctaagaagtagatcccctttcctcattgagttttttttaaaacaaggaagtttcccatcagtgattgaaaatctgtgactagtgctgaagcttattaatgctaagggctggcccagattattaagctaataaaaatatcattcagcaac

SEQ ID NO: 161 - DNA, 2018 bp, Mus musculus
agaccgtgagcgagagcgccccagagaagcgcctgcaatctctgcgcctcctccgccagcacctcgagagaaggacacccgccgcctcggccctcgcctcaccgcactccgggcgcatttgatcccgctgctcgccggcttgttggttctgtgtcgccgcgctcgccccggttcctcctgcgcgccacaatgagctccagcaccttcaggacgctcgctgtcgccgtcacccttctccacttgaccagactggcgctctccacctgccccgccgcctgccactgccctctggaggcacccaagtgcgccccgggagtcgggttggtccgggacggctgcggctgctgtaaggtctgcgctaaacaactcaacgaggactgcagcaaaactcagccctgcgaccacaccaaggggttggaatgcaatttcggcgccagctccaccgctctgaaagggatctgcagagctcagtcagaaggcagaccctgtgaatataactccagaatctaccaaaacggggaaagcttccagcccaactgtaaacaccagtgcacatgtattgatggcgccgtgggctgcattcctctgtgtccccaagaactgtctctccccaatctgggctgtcccaacccccggctggtgaaagtcagcgggcagtgctgtgaagagtgggtttgtgatgaagacagcattaaggactccctggacgaccaggatgacctcctcggactcgatgcctcggaggtggagttaacgagaaacaatgagttaatcgcaattggaaaaggcagctcactgaagaggcttcctgtctttggcaccgaaccgcgagttcttttcaaccctctgcacgcccatggccagaaatgcatcgttcagaccacgtcttggtcccagtgctccaagagctgcggaactggcatctccacacgagttaccaatgacaacccagagtgccgcctggtgaaagagacccggatctgtgaagtgcgtccttgtggacaaccagtgtacagcagcctaaaaaagggcaagaaatgcagcaagaccaagaaatccccagaaccagtcagatttacttatgcaggatgctccagtgtcaagaaataccggcccaaatactgcggctcctgcgtagatggccggtgctgcacacctctgcagaccagaactgtgaagatgcggttccgatgcgaagatggagagatgttttccaagaatgtcatgatgatccagtcctgcaaatgtaactacaactgcccgcatcccaacgaggcatcgttccgactgtacagcctattcaatgacatccacaagttcagggactaagtgcctccagggttcctagtgtgggctggacagaggagaagcgcaagcatcatggagacgtgggtgggcggaggatgaatggtgccttgctcattcttgagtagcattagggtatttcaaaactgccaaggggctgatgtggacggacagcagcgcagccgcagttggagaatgccaaggggctgatgtggacggacagcagcgcagccgcagttggagaagacttcgcttcatagtactggagcgggcattattgctccatattggagcatgtttacggatgacgttctgttttctgtttgtaaattatttgctaagtgtatttttttgctccagaccccccccccctttcttggttctacaattgtaatagagacaaaataagattagttgggccaagtgaaagccctgcttgtcctttgacagaagtaaatgaaagcgcctctcattccttcccgagcggagggggacactctgtgagtgtccttggggcagctacctgcactctaaaactgcaaacagaaaccaggtgttttaagattgaatgtttttttatttatcaaagtgtagcttttggggagggaggggaaatgtaatactggaataatttgtaaatgattttaattttatatcagtgaagagaatttatttataaaattaatcatttaataaagaaatatttacctaaa

SEQ ID NO: 162 - DNA, 4339 bp, Mus musculus
gagagtctgggagaacaagttcaggggcaggcgacaaggtccgggtgctgagcaaggtggctggacaagcctagcgggagagaaacctgaggccacgagcgacctccggaggagcccctagacgggagtcttagctgagacacggcagcatgcaaccagcccagatgcgccttgcagaacgagagcctattttcaacactcttcccgcagtcgggcctgcacgccttcaggaacccaccaccactctcccaattgttccctgaaatgaacgttcctggcgcgccctctcgtggactgttgaagtaaccatctgtctctaggaagccatggcaaccacgcatgcgcagggccaccagccagtcttgggaaatgacactctccgggaacattacgattacgtggggaaactggcaggcaggctgcgggacccccctgagggtggcaccctcatcaccaccatcctcttcttggtcacctgtagcttcatcgtcttggagaacctgatggttttgattgccatctggaaaaacaataaatttcacaaccgcatgtactttttcatcggcaacttggctctctgcgacctgctggccggcatagcatacaaggtcaatattcttatgtccggcaggaagacgttcagtctgtctccaacagtgtggttcctcagggagggcagtatgttcgtagccctgggcgcatccacctgcagcttactggccattgccattgagcgacacctgaccatgatcaagatgaggccatatgatgccaacaagaagcaccgcgtgttccttctgattgggatgtgctggctaattgccttctcgctgggtgccctgccaatcctgggctggaactgcctggagaactttcccgactgctctaccatcttgcccctctactccaagaaatacatcgccttcctcatcagtatcttcaccgccattctggtgaccatcgtcatcttgtatgcgcgcatctactgcctggtcaagtccagcagccgcagggtggccaaccacaactctgagagatccatggcccttctgcggaccgtagtgattgtggtgagtgtgttcattgcctgttggtccccactttttatcctcttcctcatcgacgtggcctgcagggcaaaggagtgctccatcctcttcaagagtcagtggttcatcatgctggctgtcctcaactcggccatgaaccctgtcatctacacgctggccagcaaagagatgaggcgcgccttcttccggttggtgtgcggctgtctagtcaagggcaaggggacccaggcctcacccatgcagcctgccctcgacccaagcagaagtaagtcaagctccagtaacaacagcagccactctccgaaggtcaaggaagacctgccccgcgtggctacttcttcctgcatcattgacaaaaacaggtcgtttcagaacggggtcctctgcaagtgacggtctcaacagggcaagctctgcagccacacctatttattgcatgcatcacttccacgtggggccttaagagatcttaactctggaggtctgcttgctgtggccagactgtgtggtatctcctgaggaggagacccaaggagtcaccaacgcatttcagcctggacttggatgtgacttatctgttgcgggctccatccttctgaatgtaccaagctgctgacacggtgcactgccttcggatgccgctacccctggtccagggaaggcaggtggtgatgtgctatgcacatgcacattgggatgatgtctccctgcgttcacactacatttattttccatagaatgggtgctcatgtgtgtgtgtgtgtgtgtgtgtgttcgttgctgtgttgtacaggatgtatacgattgattttcccaggtggaacccattacaaagtgtcagtcttccacacatcattggtccaaacctgcccacactgctgtcccaggttcagcatgtgataaggtcatgtccccttcccagtgcccttgcactggtgttctaactcatagctgtgaaaagttactaaagtattctgtattctcaaaagcctcacccaagagcagcccaggtgtgtgggtcttacccttacattcctgcacccctcctccctcttgggtcccttgcgtaagcttaggtacacctaagagccaaattatgcgatcattgaggcatttctgaaagccacagaaaagccagccgggatctctcggaatgcaggcaccactaaaggaagaactcctaaggagaggcaaggtgctctccactgtgggcaatctttctaggggactgcagtctgtctgctgcatgtagagagtttccagcagtgacgttcacaagccagcccttcatctgtatggtcctgagttcaagtctatagagagaagcttgaggctgcttgtcccctttgctgtcaccctttgctggcaaggagctggagctgtcagcaaagcttctcaactccctcagttatggaccctgtccaggactattcagtgagaggattccgccaggctgggaggcgtgatgtagttatttgtgtgctctttagagagaaccattccaattcccatatgatggacactccagccactctcctccgcttggacctgcgttcatttgtccatcctgtaaagaaaatgcgtagaagacacctctgaacatcccctccccaaggattccgcccacagggcacacagatgaaaggtgggtgcgttggagagtggccagcatccatgctcccagaacagccttcggaaagactctcatttgaggaaacgtcatgtcaaggctccccataagttgattagtctcagagactgttgccttatgaaccctggaagagcagcctttacacactcatgggcctttttaaaactgatttttttttccctcttggtggttacctgatggcatttgctcttgtttagggacatttttctgggccttaggtaaccctggtctgactaactaaagacttcccctcatgtcactcctggtgtatataggtcactgccaagaagttctgctccatcattggccttgcccttctctatgtcaccaagaaaatgtcaccgtgttgacaaaacccatggcatttctggaaaaggaaagcatacaagtgctgggttaagggaaaaataaatagcagagcagtgtgtaggggagttgaggtggaaagagaacagggcttgtgggcacgctctttcatgattgcaaggctttgaggccgtgggtctaggtcactgatattaatcacacattgtacaggattctggcttctccatttcctcctgtgtctgctttcacacaacagcccttgtggagggccaggcccaccatccccagctaggaggtgacatttgtagcatgacagactgccaagcaactgaaaataaaaatacactaaaacccaattgcgctcacttgatgtatgcccagtggatccgtcgaccgtgatgccagtgtgcacacctttccctagctagcctccgagacagcactgagacatcgggtgcatccaaccctcaccctgaaggtcaaaggtcggaaaccagtgacaccagagaccctggggctcgcccaaggtagtgagcaaccttggctacttgcagtttatgtttgttaataataaataaaaccaaaagcctgtataaaaacccatcctggaggcctgtgtggtatgttctattgttttggaatagacactcggggggtgtagtggggtggtcttgcttctctccctagaacctgatctcacagcattacaggcataaactacatttgatgcccaatcactaagtcccttttatcccccagggccatcttgtagatgatgttagattgaagctttagcgtactggatgctactgatacaggtctgggtagatgctgttttactggtggtggtggtggtggtggtggtagcggtggtgagtgtgtgtatgtgtgtgcccacccatgtacactattgtgcatgcaggagaggccagaggttaatgttggatctctctctctctctctatgctctccatcttggtttttttgttgttgttttgttgttgttgttgttgttttgttgtttgtttttttgagacaccatttctcactgaacccgaagctgccagctttggctagattgactgaccaacaattccccccaggacctgtgttcctcctgtcatggttataggcacaaactgccctctgtggcatttacgtaggcacagggcatcccaggggagccatttcccagcagatcctatgatttgaagaatggtaatagcccctctgtagggaagaaattataaaataaaaatgtcatccaacc

SEQ ID NO: 163 - DNA, 1620 bp, Mus musculus
gcccaaccttcttccctggcgagttagaagctgcccctcaccgaggaggagaatggcgctcaaacagatttccagcaacaggtgctttggcgggctccagaaagttttcgaacatagcagtgttgagctgaaatgtaaaatgagatttgctgtctacctaccaccccaggccgagagtggaaagtgtccagcgctttactggctgtctggtttaacttgcacagaacaaaatttcatatcaaagtctggctatcagcaagctgcctcagagcacggccttgtggtcattgcccctgataccagccctcgtggctgcaatatcaaaggagaagatgacagctgggacttcggcactggtgctgggttttatgtgaatgccactgaagatccttggaaagctaactacagaatgtactcttacgtcaccgaggagcttccacaactcataaatgccaatttcccagtggacccacagaggatgtctatttttggtcactccatgggaggccacggagctctgatttgtgctttgaaaaatcctggaaaatacagatctgtgtcagcatttgctccaatttgcaaccctgtgctgtgttcttggggcaaaaaagcttttagtggatatttgggaccagatgaaagtaaatggaaggcatacgatgcgacctgtctcgtgaaggcctattcgggttcccagattgacatcctaatcgatcaaggaaaagatgacgagtttctttcaaatgggcagttactccctgataacttcatagctgcctgcacagagaagaaaatccctgttgtgtttagactacaagagggttatgatcatagctactacttcattgcaactttcatcgctgaccacatcagacaccatgctaagtacctgaatgcatgaaaagcctcagccaagagaatctcatcaggaggccggaagggaatcaacaggagtgctgacttcctcgcagaagatcatgatcctgcagctgaatcgcttttctgaataaatatatcaaactttctggtttaaattgttattttaccaccattcacgtaggagtttaatgcttggtaggttttctgagtcatttggaattccctgttaagtagcctcaagccatagactgtgactgcagctctcttggtggtgtatgttcaagaacttaaagggaatttagcacaagtttttcatcccatcagacgttaggccactagctcttcttactgcgtacctttctctcctgtctgtcgaggatctgatttctagaaggcaatgatggccagtcattaagaggatagggaaacgggcacaggagagtcaggcacactgtctgtggcagacttcctcagtgctagtccagttttttcttccttgatgagctgaacgcatttgtaaattttgtttgggggtttgttgagtctctcaagattatatagtaagacccaatctgaaaataatgtaaggagataaactgtatactactatcaacaactactttatcttagttacatggagaagtttttcttagtgagctcacagagaaaagtcactggtctctgtaaatacccacactgctccccgaaaagatcaatagataatgctttttgaaacgtgcg

SEQ ID NO: 164 - DNA, 1984 bp, Mus musculus
ccacgcgtccgcccacgcgtccgccgacattagtcattcatcccgctcatgctttggagcgtttattaagggcttcactcctgcctcacactatctctcccgggctcaaactcggatcactgtagagtctcgcttcttcccctgcggctgcgaagcaaatttcgcctctccagcaatgcacctccctgcgatcctgctttgtgctctctggtctgcagtagtggctgagacctcggatgactacgagctcatgtatgtgaatttggacaacgaaatagacaatggacttcatcccaccgaggaccccacgccatgcgactgccgccaggagcactcggagtgggacaagctgttcatcatgctggagaactcgcagatgcgggagggcatgctgttgcaggccaccgacgacgtcctccgtggagagctgcagaggctgcgggcagagctggggcggctggcgggcggcatggcgaggccgtgcgcagccggtggccccgcagacgccaggctggtgcgggcgctggagccgctgctgcaggagagccgtgacgcgagccgcaggctggcgcgcctggaggacgcggaggcgcggcgatccgaggcgacagtgtctggcctaggcgctgtgctggaggaactgcggcggacgcgcgccgacctgagcgcagtgcagagctgggtcgcccgccactggctgcccgcaggttgtgaaacagcaattctcttcccaatgcgttcgaagaagatttttggaagcgtgcatcctgtgagaccaatgaagcttgaatcttttagtacttgcatttgggtcaaagccacagatgtattaaacaaaaccatcctgttttcttatggcacaaagtggaacccctatgagattcagctgtacctcagttcccagtccctagtgttggtggtgggtggaaaggagaacaagctggctgcagacactgtggtgtccctggggaggtggtcccacctgtgtggcacctggagttcagagcaggggagcatgtccctgtgggcaaacggggagctggtggctaccactgtagagatggccaaaagtcactctgttcctgagggtggactcctacagattggccaagaaaagaatggttgctgtgtaggtgggggctttgacgaatcattagcattttctggaagaatcacaggcttcaatatctgggatcgggttctcagcgaggaggagatacgggccagtggaggagtcgaatcctgtcacatccggggaaatgtcgtcgggtggggagtcacagagattcaggcgcacggaggagcccagtatgtttcttaagtgttgtgaaaaatctacttgaagccaaaggagactcacattttaaatatgccagttggaaaagtctgaaaacttcggtgcgtaatagacgaatgaaggagagacttgagattgtctttgtttatcttggcaaaatactgaatacacagttgaagggaaggcttgagagagggctccgggatgttgttactaagccttatactgtggtgctttcagattaatgtctgcctctgtcagataaaccctcagataactaaacaggactggactctgaacagagggacgattgtgtgactttttttttttttattttggttaattttattttggccagagacatttttatattggaagaataacaaaacaagctctgttgcccattgttcattctttctggtgtgtattttgtgacaaaagagatgatgagaaaaccatatttataccacaaagtgacttattaacgaacataaatgtagcttacgtgttataatccaatgttccatttgggagaaggtagttgtgtaatttatattgtgaaatgtatttgtattaattttatttttgtaaaagtctactgtaaataaaatgttttataaagcttaaaaaaaaaaaaaaaaaaaaaaaaaaaaaaaaaaaaaaaaaaaaaaaaaaaaaaaaaaaaaa

SEQ ID NO: 165 - DNA, 2580 bp, Mus musculus
gaggagtcctgcacagccatggcggccaggaggacacatgaaagagatccaatctacaagatcaaaggtttggccaaggacatgctggatggggtttttgatgacctggtggagaagaatgttttaaatggagatgagttactcaaaataggggaaagtgcgagtttcatcctgaacaaggctgagaatctggttgagaacttcttagagaaaacagacatggcaggaaaaatatttgctggccacattgccaattcccaggaacagctgagtttacaattttctaatgatgaggatgatggacctcagaagatatgtacaccttcttctccatcagaatccaagagaaaagtagaggatgatgaaatggaggtaaatgctggattggcccatgaatcacatctaatgctgacagctcctcatggactccagagctcagaagtccaagatacactgaagctttgtccacgtgatcagttttgtaagataaagacagaaagggcaaaagagatatatccagtgatggagaaggagggacgaacacgtctggctctcatcatctgcaacaaaaagtttgactacctttttgatagagataatgctgatactgacattttgaacatgcaagaactacttgaaaatcttggatactctgtggtgttaaaggaaaaccttacagctcaggaaatggagacagagttaatgcagtttgctggccgtccagagcaccagtcctcagacagcacattcctggtgtttatgtcccatggcatcctggaaggaatctgtggggtgaagcaccgaaacaaaaagccagatgttcttcatgatgacactatcttcaaaattttcaacaactctaactgtcggagtctgagaaacaaacccaagattctcatcatgcaggcctgcagaggcagatataatggaactatttgggtatccacaaacaaagggatagccactgctgatacagatgaggaacgtgtgttgagctgtaaatggaataatagtataacaaaggcccatgtggagacagatttcattgctttcaaatcttctaccccacataatatttcttggaaggtaggcaagactggttccctcttcatttccaaactcgttgactgcttcaaaaagtactgttggtgttatcatttggaggaaatttttcgaaaggttcaacactcatttgaggtcccaggtgaactgacccagatgcccactattgagagagtatccatgacacgctatttctacctttttcccgggaattagcacaggcaactctcatgcagttcccagtcaagtattgctgtagctgagaagaaaagaaaattccaagatcccaggatttttaaatgtgtaaaacttttcagttagatattttatacaatatcataaggctagataatttccataggttatttttaggggaaacctgatacgtaaaattttgcatgaaaagtatagattcgttccttccttccaaatctgctcatcttttactttattttattaaatttatatttgcacatttttgtaaaatgaataaaggaaaaagacactaaagaacatgtctgaacatatcctggaacttcttctttgtaaaatgaataaaggaaaaagacactaaagaacaaagatgatacaccttttgatgaaccactttcacctataaattagtagtaagaatttactcacaaggaagatcttatctacaatgtagctgagaaatgaaactgttgcatatgtaggtaaaactaatcatcttttaggaataagataaagaggtttatgtccactgtttgtctctggcatacatggttttcatgcctagtggctacctaccattcctttcaatcaatttcttaggatataattgacaaatttatgctatgtttataatttttctcttaaatgcttttgtaataagatatactcacacatacacatttaagattctgtctattagtgttattgaaataaatcctagaaacaaaaattaaaagtttaaagcattaaagacaattttgagacaaaatattctatgaaattctatgcaaaattgaattcttctacaagtatgtgatgaagcccacctaccactatttttgtcatcttgaggatgttatatcattatttttacttaactgagctcaaattaaaatctttgtttattctttgttctataaaatgtttcagaatctttctttactgcatagtaagtgttagctcatttttcctggggttacaagttctgtacaagcatgccttgaaattgtgagagccaccccttctgagtgttcttccttaactcataccagatctatgatctctttctgaaagtgtccattaacagttcatttctacccattctctctggtcctactatcttttcagtctatgttaaatatgtacctatccaaaaaaaaatctcatgagcacttttaaattaaggtctggtggttccccacatccttgcttctttgcatttgtcctgatggacataaacatagcttgtttttgccatttatatgtccatacctcctcacaagaataaaagccccacgagggacc

SEQ ID NO: 166 - DNA, 3418 bp, Mus musculus
gccctttcggagctgaaggtcaggaaaagccagagatttatatacttggaagtgtcgtgtttcccaggactcagaatgacttcagcccagaaagcagctgaaggggttaacgtggggacttggctggctgtcagttaaactttttccctggctctgggtttccccttgaagggatttccctccgcctctctagcaagaccctttataaagagcagactttctatttcactcacaccagcccggctggctttggaggctgaacacttttcccagacacttttcacgtggggcacaaagaaggctttgaagcagagacttgaaatgcctgtgaagatggtcgcggtcttgggagcctcaacggtactttggatactgtttgcagtctctcaagcttttaaaatcgagatctcccctgaatacaaaacgatcgctcaaatcggtgactccatggccctcacttgcagcactacgggctgcgagtcaccattgttctcatggagaacccagatagacagcccactaaacgcgaaggtgaggacggaggggtccaagtccgttctgaccatggagcctgtcagttttgagaatgaacactcttacctgtgcacagcaacatgtggctctgggaagctggaacgaagtatccacgtggacatctactctttccccaaggatccagagattcaattcagtggccccctggaggttgggaagccggtcacagtcaagtgtttggctccagacatttacccagtttacaggctggagattgatctgttcaagggtgaccagctcatgaacagacaggagttttcttcagaagagatgacaaagtctctagaaaccaagagtttggaagtaacctttactcccgtcattgaggatattggaaaagctcttgtttgccgagctaaattacacattgaccaaattgattctacactcaaagaaagggagactgtcaaagaactacaagtctacatctctcccaggaatacaacgatctctgtacatccctccacaaggcttcaagagggtggtgctgtgacaatgacctgttccagcgagggtctaccagctcctgagattttctggggcaggaagttagataatgaagttctccagcttctctcaggaaatgccatcctcaccttaattgctatgaggatggaagactctggagtctatgtgtgtgaaggagttaatctgattgggagagacaaagcagaagtggaattagttgttcaagagaaaccatttattgttgacatctcccccggatctcaggtggctgcacaagttggggattcggttgttctgacgtgtgctgctattggctgtgactccccttctttttcttggagaacccagacagacagtcccctcaatggggtggtaaggaatgagggggccaaatccacgcttgtgttgagctctgtgggttttgaggatgaacactcttacctgtgcgctgtgacctgtctgcaaaggacactggaaaagagaacccaggtggaggtctactcattccctgaagatccagtaattaaaatgagtgggccacttgtgcatgggagacctgtcactgtcaactgcacagtccctaatgtgtatccctttgaccatctggagattgaattactgaagggggagactacactgatgaagaaatattttttggaggaaatgggcataaagtccctagagaccaaaattttggaaacgaccttcatccccaccattgaagataccgggaaatctcttgtttgcctcgctaggttacacagtggtgaaatggaatctgaacccaaacagaggcagagtgtacagcctctttatgtcaacgttgcccccaaggaaaccaccatctgggtcagcccctctcctatactagaggagggcagtcctgtgaacctgacctgctcaagtgatgggataccagctcccaaaatcctgtggagcagacagctaaataatggggaactgcagcctctttctgaaaatactacactcaccttcatgtctacaaaaagggacgattccggcatttatgtgtgtgaagggattaacgaggctggaattagcagaaaatcagttgaactgattatccaagtctctccaaaagatatacagcttacagtctttccatctaagagtgtcaaagagggagacaccgtcattatctcctgcacttgtggaaatgtgcccgaaacatggataatcctgaagaagaaagcaaagacaggagacatggtattaaagtctgtggatggctcgtacaccatccgccaggcacagctgcaggatgccggcatatacgagtgtgaatctaagactgaagttggctcacaattaagaagtttaacacttgatgtaaaaggaaaagaacataacaaggactatttttcgcccgaactccttgcactctactgcgcatcttccttggtaatacctgccatcgggatgatcgtttattttgcaagaaaagctaacatgaaaggatcgtacagtctggtggaggcacagaaatccaaagtgtagctaacatctgaaatgtttgagaagagacattatttataaaacccagatccttaatactgtttattacagccccgccccctccacaaaccaagccatgcattcagacttcccagaacccttctcagtaaagaaggcaaagtggctgcttgatcccttgctgaatgcaaggagctaaccagaaaagttctgcttgacaagtccccatcgttgaagtgactggaatggtcccatgatgtgtatgtaaataacataaactgtatatatgtaaaataaaattatgccgtcgcgaggttgtttagagtagcagcactccatatgcaggtcagaacgtaatcagagagtgttgcttggactgactgttgtaacttaatgcttcttaggaaagtttaatattaatgttaatgttgactaggcagctaaccagtgtcacctttttatgttttattttcttcaacctaattttattcctatgaattttattaacaatgatttcatgttttttaaaagaagtcagggttctatatttttataggcaaatggtaaagaggtcactgggttgactttcaggtactactttctaattcatggtagaatggctaagtaattttctctacatggtactgtacggtacggggacctgtttcttcattggggtcttgtgtaatgactaacctgatttaaatgcgacttcatttgatttgtcttttataaatactatagtaaagtggaagtttctgaacatgggagagttgtgtttcatttgttgtaaattgtctctcttaattgttttgttcttctggaattgtccattataagagtaaaaacttcaaactactaacctaatacagatactcgaaacataaaaaaaaaaaaaaaa

SEQ ID NO: 167 - DNA, 3045 bp, Mus musculus
cggcgcaggggaggggacagccagacaagcacagccgcggcttaaaagggcagctcgcgcccagcccttcctccccgcggtccaggcctgcgagctccggtctttacagctcccgccgcactcgcctcagcccgccgccgccgccatgtaccgccgtctgggcgaagcgctgctgctgtcccgcgccgggcccgctgccctgggctctgcggctgcagactcagccgcgctgctgggctgggcccgcggacagccctccgccgccccgcaacccgggctcacgccggtcgcccggcgccactacagcgaagcggccgccgaccgcgaagacgaccccaacttcttcaagatggtggagggcttcttcgaccgcggcgccagcatcgtagaggacaagctggtggaagacctgaagacccgggagagcgaggagcagaagcggaaccgggtgcgcggcatcctgaggatcatcaagccctgcaaccatgtgttgagcctctccttccccatccggcgcgacgacggctcctgggaggtcatcgaaggctaccgggcccagcacagccagcaccgcacgccctgcaagggaggtatccgttacagcactgacgtgagtgtggatgaagtaaaagcactggcttccttaatgacatacaagtgcgctgtggtcgatgtaccgtttggaggtgctaaagcaggcgttaagatcaaccccaagaactatacagataatgaattagaaaaaattacacggaggttcactatggagctggccaagaagggttttattggtcctggcattgatgtgcctgccccagacatgagcacgggtgagcgggagatgtcctggatcgctgacacctatgccagcaccatagggcactatgatatcaatgcgcatgcctgtgttactgggaaacccatcagtcaaggaggcatccacgggcgcatctccgctactggccggggtgtcttccatggaattgaaaacttcatcaatgaggcttcttacatgagcattttaggaatgacaccaggctttggcgataagacatttgttgttcagggatttggtaatgtgggcctgcactctatgagatatttacatcgttttggtgctaaatgtgttggtgttggagagtctgatgggagtatatggaatccggatgggattgacccaaaagaactggaagacttcaagttgcaacatggatcaattctgggcttccccaaagccaaggtctatgaaggaagcatcttggaggctgactgtgacattctgattcctgccgccagcgagaagcagttgaccaaatccaatgcacccagagtcaaagccaagatcattgctgaaggtgccaatgggccaaccactccagaggctgataagattttcctggaaagaaacatcatggttattcccgatctctacttaaatgctggaggagtaacagtgtcttactttgagtggctaaagaatctaaatcatgtcagctacggccgattgaccttcaaatatgaaagggactctaactaccacttgctcatgtctgttcaagagagtttagagagaaagtttggaaagcatggtggaactattcctgtggtccccacagcagagttccaggacaggatatcgggtgcatctgagaaagacattgtgcactctggcttggcctacacaatggagagatctgccaggcaaattatgcgcacagccatgaagtataacctgggattggacctgagaacagctgcctatgtcaatgctatcgagaaagtcttcaaggtgtacaatgaagctggtgtgaccttcacatagacagctcacagccgacttctttaccacctcttcacctataatttctgcagacctgtcacaagtttccatataaccatagaaatctgttcttgtgactcattagttaacggacactgttctgaacaagtcagttggaatcagccccttaagagaaagagattaagttagaggatcatgtacaagctgatggtataaaagtaggaatcacgtgtatccaagccagttaggtggtttgcttttaggtaaagtcttgctcctgtgctgtcttgctctgggcccttcccagcagagtcagtgctgttgccagggaaggagtcaggagcagtcagtcacttcttgacatgtctgggaactccgacacatataagaagtaggtgtgtggcgttttccaaaggtggcatggtcctcaaatgagttattgtggttttacatcaaaaaaaaataactcagttttctaagttgcaaacaaaaataaaagctatgtctcatgtattttattctctcagaataaaccagtacatgctgctgtaataaattgccttcaaccacttaagcctaacctttactcaagcagtgaacacctaaaatagaagaaatggaagaagctagttttttatactataaaacagtatcacttgtagcttattggccctgcatcattgtccagcagaaataaagtagcactatggggcgctctcctcagacctgcaagggacaagggactcttgggaactggtaatgcagtccagagagtacagtaaccactttaccatgaaaactacttgttcttcccatttgaaggtctattctgttgagtaattgaaccataattcaaatcgagtgtcccagaaaaaaagacttgggctccctgtttggagtctggcaggcttcgagcacgagccagtggccaggctcaacctgtgtgtccccttccaaggctttgcattctgctcaccgcttcaccagcagcaggctagagactgcctgcctgggcttgacttttgtttggggggttattggccagggcttttgaacaggaatgtcccacagaagtaccagacattatttatataaggatgaacgcttttttttaacagtaccctttcagaaatttctaactactttgtaactgcatgattaacttggtgataaaagcagttattaaaagtctaccttttccaaaaaaaaaaaaaaaaaaaaaaaaaaaaaaaaaaaaaaaaaaa

SEQ ID NO: 168 - DNA, 2882 bp, Mus musculus
gcagtcgcaaggatggagttcgtcaagtgtctaggccacccggaggagttctataacctgctgcgattccgcatgggaggccggcggaattttatacccaagatggaccaggactcactcagcagcagcttgaagacctgctacaagtatctcaatcagaccagtcgcagctttgccgcggttatccaggcgctggatggggacatacggcacgccatatgtgtgttctacctggttctccgagccctggatacagtggaggatgacatgagcatcagtgtggagaagaagatcccactgctgtgtaacttccacactttcctctatgacccagagtggcggttcactgagagcaaggagaaggaccgacaagtgctggaggacttccccacgatctccctggagtttagaaatttggctgagaaatatcaaacagtgatcgatgacatctgccaccggatggggtgtgggatggcagaatttgtagacaaggatgtgacctccaaacaggactgggacaagtactgccactacgttgctgggctggtgggaattggcctttctcgtctattctctgcctcagagtttgaagaccccatagttggtgaagacatagagtgtgccaactcaatgggtctgttcctgcagaaaacaaatatcattcgtgattatctggaagaccaacaggaaggaaggaagttttggcctcaggaggtgtggggcagatacattaagaagttggaagactttgctaagccagagaacgtagatgtggccgtgcagtgcttgaatgaactcataaccaacaccctacagcacatccctgacgtcctcacctacctgtcaaggctccggaaccagagtgtgtttaacttctgtgctattccacaggtaatggccattgccacactggctgcctgttacaataaccagcaggtattcaaaggagtagtgaagattcggaaggggcaagcagtcaccctcatgatggatgccaccaacatgcctgccgtcaaagctatcatataccagtacatagaagagatttatcaccggatccccaactcagacccatcatcaagcaaaaccaagcaggtcatctccaagatcaggacacagaaccttcccaactgccagctcatctcccgaagccactactcccccatttacctgtcatttatcatgctcttggctgccctgagctggcagtacctgagcaccctgtcccaggtcacagaagactatgtccagagagaacactgattttgtttagccggaagtggaagttcccgtggagtgggtttttccttttcctccagctggattttgacttcccttgtttttcctcctactctaaaatctttgggagaactgagtgtgggacctttaggaactgggcagaggaaaggatgccttgccctcagcagcctggtgctggctgggacttggttcctctgcctcttgtagccactggcagcgtgccgactgctgcacttgtgaggccacgtgtgatggtcacaagagcctagtgaacctggctagaatgctgattggatttatttaatttgaaacagcctttgaatacctatgacaatagaaaatgaaagcaactggtccttgtctttctcatgagtttgacagtggaagtgttaatccgtgttgttctgcgcgatgctgtgagctcccgagactgcaggcttggccttctcacccagggggagcttaagcccccatcggtgccgttggccacttgtcagcgcgtcctccaggaaaggcttttgatgttgagatttttttgtaatagcatagaatgaatgcacacagtaacatgctcacatcccttgtaaggactgagtttgtccggtgcagctcacctgaaagcccagaaagatggcctagtgatctcaggactgggtcctccatcaccacagcaagagtgttgctgatgagggtaaggaaagcaggcagtgcggtcacctctctgctttagcctgccactgctgtttgcccctccctccagtctcctctacagtcatttgctttggtttttcttgaagtctcaaaagacaaatgatgacaggaaaaccagttctatattggtaggtttttaattgcagcgtggttagttggctacattgtcatggtggcctctgacaccctgtgtatctgaaaaccagtgtttgagcggtggagaggctctaggcaaccactctgactgtaggacaagatacctgaggccaactgctttaccaaggaaagaggattgtttatgtaacagcttaggaggatgaaagtacaagatgaggggggccccatctttagcccttggacggccttgtgagaaatgacactacagtagagagaggacatgcaggagagagcacgtgacaggaagcaggagtcgacgccctggcatgctgacacttgtacactgtaactgtagctcaggttggcctgcaagtctatgtagccttgaatttaatggtgatcccactgcctcagccttctgaatgtacgagttataggcacgagccaccccactgttgtccacagagcttggtctctggagccctaactctggaagactagcattgagcccttttgagaacagtgcctcagctacctgtcattttgtgaacctgtatatgaccctttggggtacgctcagaccacagagacatgtagagcatagtctgctcccctcttaagcctgctgcgtatgttgacttcatcactgaggtgcctcggccagttcagtggtccattcaactttgtaagcacagattccttgctggattactggggcatggagacttcattggtcacttgctctaagccttgaacaaataccaccccgctgaaaaaaaaaaaaaaaaaaaaaa

SEQ ID NO: 169 - DNA, 1418 bp, Mus musculus
gcggggcgtcccgagcgcgtgggcctgcgggtcgggtcaagaggtcgaaggtgctgcgcgtgatccaggatccgaattggcccggagcaggagcatggcgtcgtcggggtcggtgcagcagctgcccctggtgctgctgatgttgctgttggcgagtgcggcacgggccagactctacttccgctcgggccagacttgctaccatcccattcgcggggaccagctggctctgctggggcgcaggacttatcctcggccacatgagtacctgtccccagcggatctccctaagaattgggactggagaaatgtgaacggtgtcaactatgccagcgtcaccaggaaccagcacatcccacagtactgtggttcctgctgggcccacggcagcaccagtgccatggcagaccgaatcaacatcaagaggaaaggtgcatggccctccatcctgctgtccgtacagaatgtcattgactgtggcaatgctggctcttgtgaagggggcaatgaccttccggtgtgggagtatgcccacaagcatggcatccccgatgagacctgcaacaactaccaggccaaggaccaagactgtgacaagtttaaccagtgtgggacctgcactgaattcaaagagtgtcacaccatccagaattacaccctctggagagtgggtgattacggttccctgtccgggagggagaagatgatggccgagatctatgccaatggtcccatcagctgcgggataatggcaacagagatgatgtctaactacactggaggcatctatgctgagcaccaggaccaggctgttatcaaccacatcatctctgtagctggctggggtgtcagcaacgatggcatcgagtactggattgtccgaaattcatggggcgaaccctggggtgagaaaggctggatgaggatcgtgaccagcacctacaagggaggcacaggtgacagctacaaccttgccatcgagagtgcctgcacatttggggaccccattgtttaggtagatgtctctggaagcagcgctgtgaaccatgacagggaggggtgattaattactgacactggacatgtccagacagctataaacagtgcttgtggacatgaggaccagagtgtggactgcatcccgagaggagacggtaaaggatgaaacacaactgcactgggaccctccaccgtaccctccaggcctgcctcctccaccactgagccctccaggcctgcctcctcttctacagtgcttgccttcagccacccggagaagagagctatggtttaggacagctcaacttatcaccagatctggagccctggaatccatgggaggggggaacaagtccagactgcctaagaaatgagtaaaatatctggcttcccaaaaaaaaaaaaaaaaaaaaaaaaaa

SEQ ID NO: 170 - DNA, 2258 bp, Mus musculus
ggcgcattgaggcgcctagggaagcgctggcttcagagaggaatcgagggactggggtctgcgcccccgcacccctgatctccggacgcgtcttccaacctcagagacacattcttgggggcttctgagccgcggttgctctgttttcccgtgacacaatgttccccttctctggctgctggaggactgaactgttattgttgctactcctggctgtggctgtgagagaatcctggcagatagaagaaaaatcgtgtgacctggtaggagagaaggataaggagtcaaagaacgaggtggctctcctggagaggttacggccactgtttaacaaaagttttgagagtactgtgggccagggctcagacacatacagctacatattcagagtatgccgggaagctagcaaccactcctctggagcaggcctggtccagatcaacaaaagcaatgacaaggagacagtggttgggagaatcaacgagactcacatcttcaatggaagtaattggatcatgctgatatataaagggggtgatgaatatgacaaccactgtggcaaagagcagcgccgtgcagtggtgatgatctcctgcaatcggcacacactagcggctaattttaacccagtgtctgaggaacgaggcaaagtccaggattgcttctacctctttgagatggatagcagcctggcctgttcaccagaggtctcacacctcagtgtgggctcgatcttacttgtcatatttgcatcattggttgctgtctatatcattgggggtttcttataccagcgactggtagtgggggccaagggaatggagcagtttcctcatctggccttctggcaggatcttggcaacctagtagctgatggttgtgactttgtgtgccgatccaaaccccgcaatgtgcctgcagcatatcgtggagtgggagatgaccagctgggtgaagagtcggaagaaagggatgatcatctgctaccaatgtgattgcactttaatgtctagccacctcttcagtccccaaaccaaagcatactcagccagacttctcaagccggtctcccatctctcaccttgcccttaatattcttgctttccagttggcttttgatttgaccctaacctgcctctctttgctccttcctattgtttctcctctgcacaagtagagtggaaggcagacagacatagggcctgtggggcagactcctgcaccccaggaagagcaaggacagctaaataggcagaaagccatgagccctggctgtaaacatttttataagttgaaacactggatactctaattaaaaagcaaagattacttgtacctttggttgcctcaagttgttctgcagtgcttacctggctgtaacccaaatactcccatttgctttgagcctggaatcagtcacctgattgtcccttgtgtgggattaggacagggaaaaaaaatgtgaaattccccaactacagaattctaaggtaccatcacgttgtgtataggtctttaagtggcttgatagtttgaattggaccctgggccatggtttataaatccataggtaacccaaatgcctaatcaagtagtccttttctaaagtaaacagaccctgtgtgttgccttgtggtagttagtctcagtggccagccttttcttcctcatctccctctactggtacttgtaaatctgagttgcacttttctcacagatctgtagtttggctttttatactttccccaatcataaaggaagggaatggaagcggaagtggacatggaggctctgcaggtctctgctttgggtggggacactgctgcacctgtctctcctgctggctcagggaagtgtctgacccacttatctatgggaaaaggattttagttctctctttctgtttaggccatctgcccagatgcaagctgatctcgctataatagtgaacgcctaggccactaagtaacaacacagttaatctgaacacaggagatgtgggaaaggcagggccattcgttactttagagaaaaatgaatgaagtcattcctacttctcaatacccttgcaatggcagtggaaattttgtttctttctatacaagaaaaataatgttatttttaaaaaaggcttctttgttgtttgcatcctaacccgtgttttcaatgaaaaataatataccacttttgtacaaaaacacaataattaaaaaacaaaaaaccaaaaaaaaaaaaaaaaaaaaaaaaaaaaaaaaaaa

SEQ ID NO: 171 - DNA, 2157 bp, Mus musculus
gaaccgggtcacgagtggccggaagttgcggcctttgcggataatctgagatggggaccactctggacatcaagattaaaagagcgaataaagtgtatcacgccggggaaatgctctctggtgtggtggtcatctctagcaaggactcagtccagcaccagggagtctctttgacaatggaagggactgtaaacctccagctcagtgccaaaagtgtgggtgtgttcgaagccttttacaactctgtgaagccgatccagattatcaacagcaccatagacgtgctgaagccaggaaagattcccagtggcaagactgaggtcccctttgagttcccactgcttgtgaaaggcagcaaggtcctgtatgagacttaccacggcgtgtttgtcaacattcagtacacactgcgctgtgacatgcggcggtccctgttggccaaggacctgaccaagacctgtgaattcatcgttcactctgcccctcagaaggggaagttgaccccaagtcctgttgacttcacgatcactccggaaaccttgcagaacgtcaaagagagagcttcacttcccaaattcttcattagaggacatctgaactccactaactgcgctatcacgcagcccctgacaggagagctggtggtggaacactcggatgctgctatccggagcatagagcttcagttggtccgggtggagacctgtgggtgtgcagaaggctatgcacgagatgccacagagattcagaatattcaaatcgctgatggggacatttgtagaaacctttctgttcccctgtacatggtcttccccagactgttcacctgtccaacactggagaccaccaacttcaaagtggagtttgaggtcaatgtggtggtcctccttcatgctgaccacctcatcactgagaactttccgctgaagctctgtcggacatagtccagctgcaggaaggggagagccagaatggccatgtggacattgacccagtcatctgctcacatggggacgtcacacagaccacctgctcacaggcatcacatcagcagcatacatcttcatgtcttctcatggcctcaaagcttgttccctgcaggtgccttacctcagccctcacgtctggaatgcaacaggatttctcctgtgtgttgcaagatcacagaaagcgttcccaatggctccagatgtgcctgtttcttcttaggttcattaagcagtgtgtctgcacattaagatgggctgcctagtgagatcatggaggcagaagagagcccccacccctctatcttgcccagactcctgacagcaaagagtcagcaaccagcaagctctctgattgagtctgtaatcccctccaaggagtgacagtgacttcatctgggaatacggagttttcccttcttgacatcttgatagtgtttcactaaagcctctaaatgttttagggcactggaaataaaaaccaacaaatagtcctggttctcacagagggagaatggtgaacagtggctgttgctggagtgtttgtgtgtgtggtactggcacacagttaatgctgccatattcccagaatgtattgagagacaaggtgcttgcataaggggaagaatgcacatggactactcggtaagtactaggttctgagtgacaggacaccgtgctgaggaagggcaatggccttggcctgtccctgaccccctgggtcacatggctttagcctcacactgtaactcatactgtatggagggtatgttgcaatactttgcttcctttgaatctcgctgttgttctgttggtccagagttaatgagcgccctgtacaccagctggcctgccttcacaggttctggggggcaggccgaggcaaagcaggcccgactggcagcctcctggctgcactcccactgttctgaacagctgagggaactggggcactgctgctggggcctcaccagggaaactgagaagacttagctgagtcacctgacagtgagttcccagagaatgtacttttgctttgtcatacttatccttgttatatttaaacaatctagtacccaaaaaatgtgggccgtactttctagtgagtctaaggaaaagtcatctttgattacataatttttttaatgaataaagaaagctaaacaagttt

SEQ ID NO: 172 - DNA, 600 bp, Mus musculus
tcgtggtgtgcccagctcttccaaggactgctgcgcttcggggcccaggtttcgacagactcttcaaaatgccatcccaaatggagcacgccatggaaaccatgatgcttacgtttcacaggtttgcaggcgacaaagaccacttgacaaaggaggacctgagagtgctcatggaacgggagttccctgggtttttggaaaatcaaaaggatcctctggctgtggacaaaataatgaaggacctggaccagtgccgagatggcaaagtgggcttccagagctttctatcactagtggcggggctcaccattgcatgcaatgactattttgtagtaaacatgaagcagaaggggaagaaataggccaactggagcactggtacccccaccctggtgcgtgttcaccacggggtcacttgaggaatctgccccactgcttcttgtgagcagatcaggacccttaggaaatgtgcaaatgagatccaactccaattcaacaatctgagagagaaaacttaatccaatggcagagaagcttctgagttttatattgtttgcatcccattgccctcaataaagaaagtcctttttttaagttctg

SEQ ID NO: 173 - DNA, 551 bp, Mus musculus
gaattccctgatccttgttacggtccagatcatccatcagccttgcaatttcagcatcctgcagcttggagccaatggtgagctccttctggatcccctcgaccactcctttggcgcttcgctgtcgaccgtgcgcttcttctagcccagtgatcagtcatggcatgccctctggatcaggccattggccttctcgtggccatcttccacaagtactctggcaaggaaggtgacaagcacaccctgagcaagaaggagctgaaggagttgatccagaaggagctcaccattggctccaagctgcaggatgctgaaattgcaaggctgatggatgatctggaccgtaacaaggatcaggaagtaaacttccaggagtatgtcgccttcctgggggccttggctttgatctacaatgaagctctgaaataaaatgggaccgttgagatgacttccgggggcctctctcggtcaaatccagtggtgggtagttatacaataaatatttcgtttttgttatgcctaaaaaaaaaaaaaaaaaaaaaaaggaattc

SEQ ID NO: 174 - DNA, 2125 bp, Mus musculus
gctttctaaactagcaagcatcgtgtgggtccttcaggagtgggagtgcagacagacctgacagcgtccgctaagcgacactgactgtacttccactcctgaaggacccacacgatgctttctaaactagcaagtctgcagaccattgctgctctgcgccgaggagtccacacctcagtcgcctctgccacgtctgttgccacaaagaagacagagcaaggcccaccatcctccgagtacatttttgaacgggaatctaaatatggtgcacacaattaccatcctttgcctgtagccctggagagaggaaaaggcatttatatgtgggatgtggaaggcaggcagtacttcgatttcctgagtgcttatggtgctgtcagccaaggacactgccacccaaagatcatagatgccatgaagagtcaggtggacaagctgacattaacatctcgggctttctataacaatgtccttggtgaatacgaggagtacatcaccaagcttttcaactacaacaaagttctccctatgaatacaggagtggaggctggagagactgcatgtaagctcgctcgtcgttggggctacaccgtgaaaggcatccagaaatacaaagcaaagattgtttttgctgatgggaacttttggggtcgaacactatctgcaatctccagttccacagatccgaccagttatgatggctttggacccttcatgccaggctttgaaaccatcccatataacgatctgcccgcactggagcgtgctcttcaggatccaaatgttgctgccttcatggtggagcccatccagggtgaagcaggcgttatcgttccggatccaggatacctgacaggagttcgggaactctgcaccaggcaccaggtcctgtttattgctgatgaaatacagacaggattggccagaactggtagatggctggctgtggatcatgagaatgtcagacctgatatggttcttcttgggaaggccctttctggcggtttataccctgtgtctgcagtgctgtgtgacgatgagataatgctgaccattaaaccaggcgagcacggctccacatacggcggaaacccactaggctgccgaattgccattgcggctcttgaggttttagaagaggagaatcttgctgagaatgcagacaagatgggcgctatcctgaggaaggagctcatgaagctgccctctgacgttgtgacctcagtgagagggaaagggttgctaaatgccattgtcatcagagaaaccaaagactgtgatgcttggaaggtgtgcctgcgacttcgagataacgggcttctggccaagccaacccacggtgatatcatcaggcttgcccctccccttgtgatcaaggaggatgagatccgggagtccgtggagatcatcaacaagactatcttgtccttctgagagtaggaactctggggagccatcttcagacagggctcttgtgaaactctgcttgcagtggccagagcctgtctcctgaaaggcatatatttcagttgatgcataatagagtgacacctaggaacctgcaggtggctgcgtgacagaaaagtgagagcgagaggcgaggcgtctctttgttgaggtttgactgtgtgggaactttctaaggagaaacggacccatctgcgtacagcctgcagatggaggcctgcagtcatttacgtgcgtctttacagtttccttgctgatgtgaatggtttgtatttagaagttatttctgagatactacagaacagttaaatcattataatcaatgaatgttaagttgattgaaggttaagcatatgtaaaatactagtttaaagtaaacttttcattggccaacaccagaatgtattatatagattctgagaattcattactaaattacactttgcttgattgcaatttgtaaaacatttattttcagtatttctttgaataaagcttaatgtttctttttacgccaacagagtattttgtatttccattttggtaataatcagtgtattatttcatcctgatgactggcatttcatcacctattgagatcactgggtgtgtttcaggccttttattctaaataaagctatgaccagtttctgtctgt

SEQ ID NO: 175 - DNA, 2043 bp, Mus musculus
ctggagcgggcagcaggagcggcgcgatcctcggggcagaaaatatctgcagaaatgtctctttatccatctcttgaagatttgaaggtagacaaagtaattcaggctcaaactgcttattctgccaatcccgccagccaagcatttgttctggtggatgcttctgctgctctccctccagatggaaatctgtatcctaaactgtatccagagctctctcaatacatgggactgtctttaaatgaagctgaaatatgtgagagcatgcccatggtctctggagcaccagcacaagggttggtagcaagaccatccagtgtgaactatatggtagcacctgtgacaggtaacgatgctggaattcggagagcagaaattaagcaagggatccgtgaagttattttgtgtaaggatcaagatggaaaaattgggctcagacttaagtcaatagataatggtatatttgttcaactcgtccaggctaattccccagcctccttggttggactgagatttggggaccaggtgctccagatcaacggtgaaaactgtgcgggctggagctctgataaggcacacaaggtgctcaagcaggcgtttggagagaagatcaccatgacgatccgtgacaggccctttgaacggacagttattatgcataaggacagcagtggacatgttggctttatctttaaaagtggaaaaatcacatccatagtaaaagatagttctgctgccagaaacggcctcctcactgatcaccacatctgtgagatcaacggacagaacgtcattggcttgaaggatgctcagattgcagatatactgtcaacagctgggactgtggttaccatcacaatcatgcctacttttatcttcgaacacattattaaacggatggctcccagcattatgaaaagcctgatggatcacaccattcctgaagtttaaacccttgtacaatgcatcacggctgaatgtttccagttttcctcttcggcaacttgtctatttcgcacatgaagctttcccggagccagggagaatatgctgcatggagacctttctctcttctctcatagctgggaacccgctctatctgatactggcttcagattttaagatgggtgtagccttagcctggttttacagatgtgagactcccaaaagatttactgactttcctagactgggttctttactgggaacctgatgtttttatataagccattgtgattaggatgactggtataggcttagctgtgtctgagacctggtcagctttctcctagaacaaagcacagtgctagtcatgtgcttcaattctgtggcattcttggactttagtacgtcagcatagtacatttagaatgattgcctttgatagttatttttttaagttttctctgtgtgagtgtgtaaaattccaattaatcaacactgttttcattccacaaaagcattacacagttgtgtgtaggttgcaagagactgtaatgattgtcactaatcttaactaccttcacttaatatgcttcaattgtcgccttaactacagtaagcatttagaataaaagccaaaatagaattattgctgccttctgaaacttgagatgttagctctctattaagctgttctgtgctagccctgagcagctcactggtaaagcagagctgcctacttgtatcaagattttctagtcactgcataaaggaaacgcctaagagttgccgtattgctttctgagaaacaaattgctatatatttcatgtaaaagttgttatactaaatagaataaattttggagtctctttttcactctagtgggtaatatctaatttggcatttgagtcctaacattatgtaactttagctaggttggggtcgttttagaatgtttccctagtcatcttaatttgttccattttctgactctgtcctataaacaaaaatggcaatgacactttatgattttttctttcttagcttgtgcctatcctattattttatgtgatattattaaatgtataaaaatgaaaaaa

SEQ ID NO: 176 - DNA, 1880 bp, Mus musculus
ggcaggcacagcctctggtctaagaagagagggcactgtgcagaagccatcgctccctacagagccgccagctcgtcgggatgcagggagccacgaccctagatgccgcctcgccagggcctctcgccctcctaggccttctctttgccgccaccttactgctctcggccctgttcctcctcacccggcgcaccaggcgccctcgtgaaccacccttgataaaaggttggcttccttatcttggcatggccctgaaattctttaaggatccgttaactttcttgaaaactcttcaaaggcaacatggtgacactttcactgtcttccttgtggggaagtatataacatttgttctgaaccctttccagtaccagtatgtaacgaaaaacccaaaacaattaagctttcagaagttcagcagccgattatcagcgaaagccttctctgtaaagaagctgcttactgatgacgaccttaatgaagacgttcacagagcctatctacttctacaaggcaaacctttggatgctcttctggaaactatgatccaagaagtaaaagaattatttgagtcccaactgctaaaaatcacagattggaacacagaaagaatatttgcattctgtggctcactggtatttgagatcacatttgcgactctatatggaaaaattcttgctggtaacaagaaacaaattatcagtgagctaagggatgatttttttaaatttgatgacatgttcccatacttagtatctgacatacctattcagcttctaagaaatgaagaatctatgcagaagaaaattataaaatgcctcacatcagaaaaagtagctcagatgcaaggacagtcaaaaattgttcaggaaagccaagatctgctgaaaagatactataggcatgacgattctgaaataggagcacatcatcttggctttctctgggcctctctagcaaacaccattccagctatgttctgggcaatgtattatattcttcggcatcctgaagctatggaagccctgcgtgacgaaattgacagtttcctgcagtcaacaggtcaaaagaaagggcctggaatttcagtccacttcaccagagaacaattggacagcttggtctgcctggaaagcactattcttgaggttctgaggctgtgctcatactccagcatcatccgagaagtgcaggaggatatgaatctcagcttagagagtaagagtttctctctgcggaaaggagattttgtagccctctttcctccactcatacacaatgacccggaaatcttcgatgctccaaaggaatttaggttcgatcggttcatagaagatggtaagaagaaaagcacgtttttcaaaggagggaagaggctgaagacttacgttatgccttttggactcggaacaagcaaatgtccagggagatattttgcagtgaacgaaatgaagctactgctgattgagcttttaacttattttgatttagaaattatcgacaggaagcctatagggctaaatcacagtcggatgtttttaggtattcagcaccccgattctgccgtctcctttaggtacaaagcaaaatcttggagaagctgaaagtgtggcagagaagctttgcagagtaaggctgcatgtgctgagctccgtgatttggtgcactcccccaaatgcaaccgctactcttgtttgaaaatggcaaatttatatttggttgagatcaatccagttggttttgggtcacaaaacctgtcataaaataaagcagtgtgatggtttaaaaaatgtcatggcaatcatttcaggataaggtaaaataacattttcaagtttgtacttactatgatttttatcatttgtagtgaatgtgctttt

SEQ ID NO: 177 - DNA, 2433 bp, Mus musculus
gtccttgttccgcccccagggggcgggggcggggcggactaaggctggcctgccactccagcgagcaggctatctcctagttcccggctactcggactagccattgccgccgcctcacctctgctgcaagtagcctcgccgtcggggagccctaccacagcgtccgccctcagcatgatggacttggagttgccaccgccaggactacagtcccagcaggacatggatttgattgacatcctttggaggcaagacatagatcttggagtaagtcgagaagtgtttgactttagtcagcgacagaaggactatgagttggaaaaacagaaaaaactcgaaaaggaaagacaagagcaactccagaaggaacaggagaaggcctttttcgctcagtttcaactggatgaagaaacaggagaattcctcccaattcagccggcccagcacatccagacagacactagtggatccgccagctactcccaggttgcccacattcccaaacaagatgccttgtactttgaagactgtatgcagcttttggcagagacattcccatttgttgatgaccatgagtcgcttgccctggatatccccagccacgctgaaagttcagtcttcactgcccctcatcaggcccagtccctcaatagctctctggaggcagccatgactgatttaagcagcatagagcaggacatggagcaagtttggcaggagctattttccattcccgaattacagtgtcttaataccgaaaacaagcagctggctgatactaccgctgttcccagcccagaagccacactgacagaaatggacagcaattaccatttttactcatcgatctcctcgctggaaaaagaagtgggcaactgtggtccacatttccttcatggttttgaggattctttcagcagcatcctctccactgatgatgccagccagctgacctccttagactcaaatcccaccttaaacacagattttggcgatgaattttattctgctttcatagcagagcccagtgacggtggcagcatgccttcctccgctgccatcagtcagtcactctctgaactcctggacgggactattgaaggctgtgacctgtcactgtgtaaagctttcaacccgaagcacgctgaaggcacaatggaattcaatgactctgactctggcatttcactgaacacaagtcccagccgagcgtccccagagcactccgtggagtcttccatttacggagacccaccgcctgggttcagtgactcggaaatggaggagctagatagtgcccctggaagtgtcaaacagaacggccctaaagcacagccagcacattctcctggagacacagtacagcctctgtcaccagctcaagggcacagtgctcctatgcgtgaatcccaatgtgaaaatacaacaaaaaaagaagttcccgtgagtcctggtcatcaaaaagccccattcacaaaagacaaacattcaagccgcttagaggctcatctcacacgagatgagcttagggcaaaagctctccatattccattccctgtcgaaaaaatcattaacctccctgttgatgacttcaatgaaatgatgtccaaggagcaattcaatgaagctcagctcgcattgatccgagatatacgcaggagaggtaagaataaagtcgccgcccagaactgtaggaaaaggaagctggagaacattgtcgagctggagcaagacttgggccacttaaaagacgagagagaaaaactactcagagaaaagggagaaaacgacagaaacctccatctactgaaaaggcggctcagcaccttgtatcttgaagtcttcagcatgttacgtgatgaggatggaaagccttactctcccagtgaatactctctgcagcaaaccagagatggcaatgtgttccttgttcccaaaagcaagaagccagatacaaagaaaaactaggttcgggaggatggagccttttctgagctagtgtttgttttgtactgctaaaacttcctactgtgatgtgaaatgcagaaacactttataagtaactatgcagaattatagccaaagctagtatagcaataatatgaaactttacaaagcattaaagtctcaatgttgaatcagtttcattttaactctcaagttaatttcttaggcaccatttgggagagtttctgtttaagtgtaaatactacagaacttatttatactgttctcacttgttacagtcatagacttatatgacatctggctaaaagcaaactattgaaaactaaccagaccactatacttttttatatactgtatgaacaggaaatgacatttttatattaaattgtttagctcataaaaattaaaaggagctagcactaataaaagaatatcatgacttaaaaaaaaaaaaaaaaaaaaaaa

SEQ ID NO: 178 - DNA, 2337 bp, Mus musculus
agtcggcccggggagctgcacgcggctggctggtcggcctgacagaccttcaagggctggagtggacgcgcggaccgactctgaacagacagacgaaccgcggccgcaaggttcccagacaggatctcacccagaggcaggcagcggacagtgccttagtggaacctcgctgtcctccaccgcctggccccggtgcaggcgtccagtggccgccgcatccaaagtgatcgctgcctccccgtctccgccaggctcgggaccatgaagctgctgccgtcggtgatgctgaagctctttctggccgcagtgttgtccgcgttggtgaccggtgagagtctggagcggcttcggagaggtctggcggcagcaaccagcaaccctgaccctcccactggatccacaaaccagctgctacccacgggaggtgatcgtgctcagggggtccaggacttggaagggacagatctgaaccttttcaaagttgctttctcctccaagccacaaggcctggccaccccaagcaaagaaaggaatgggaaaaagaagaagaaaggaaaggggttagggaagaagagagacccatgcctcaggaaatacaaggactactgcatccacggggagtgcagatacctgcaggagttccgtactccctcttgcaaatgcctccctggttaccacggacacaggtgtcatgggctgactctaccagtggagaatcccctatacacatatgaccacactacagtcttggctgtggtggctgtagtactgtcgtccgtctgtcttcttgtcatcgtgggacttctcatgtttaggtaccacaggagaggaggttatgacttggaaagtgaagagaaagtgaagttgggcgtggctagctcccactgaggaggacctgagctataggaaccttcagaggctacttctgagacagtggttcgttacacgttctacatagaggagaaatatttcaccagcagccatgaaaacgtcttcattcatttccagttgctaccctgactgggcctcctgtaattgctctgttaaaagaaaaaaaaaatctcagagcctctaagtgccaaacagaccatgccgctgggatccggatcagaagaaagcaggatcgagtgagcccttcaggccttcctggtcctcctccattgaacccactggtttgtttaaacacttagcttctggattagagtgtcagctagtttccatatgctccaggatttttgactggaaaaaaaaaaaaaaggagaggaaggttaaatggtttatggactggaagagagcaacagagctgagaagctatgtgttcaagtagccgcaagggatctgctgtttggaccctccagcacgctggatttgatgaactaactgtgaaataccgcaagctcgagaactcttgagttttgggacttttctacccagagggggaaaataacaagtattttgttgttttgttgtttttgtttgtttgtttgtaaaatgccttttaaattatatatttattttattctatgtatgttaatatatttagtttttaacaatctaacaataatatttcaagtgcctagactgttactttggcaatgtcctggcccacttctctgcgctccaccatctcggctcaatgccacgctgggtcctatttgctctgtaacccatcggtagtaatttattgtctgtctacatttcagaagatgtccctggagcagaatatcccagggtaggttgtgtatggtcagagtgcagggatcggtttgggcggagccactctgtgagttggactgcagtcttgcctaggtgatttttgtctaccgttcgtgttccgaaagcccaaggtgctgatgttagcgtgtaatagatattggtgtttgcctgtgtcctctccctgccaaatcccagaagagattgagcatccatgcctgcaggaagtccatgggcttcctggtcctctatccccccacctcactccctttgtgtcaagacatttcccttatcctgctgttcttcgggtgctacttcgtgcaggggttggcagagcacaggacagtttggagaaggcattagtaaaggaaaaggctgaggaagagcagggagctttggagttgactattcttggtcattgatacctatcaattactatagggaaggttggtgggagggaaggttttgggtaaggagactacgtgtctcaccaagactataatgtatgctgtcacagtccccatggaaggttctagtgccatgtctgaactgttacaacttatatttccaaaacctggttcatatttatactttgtgacccaaataaagataacccttactcca

SEQ ID NO: 179 - DNA, 1280 bp, Mus musculus
gcgcagtcagctcagccccctgtggcggctccctcccggtctctcctcctacgagcagcatgaaagccttcagtccggtgaggtccgttaggaaaaacagcctgtcggaccacagcttgggcatctcccggagcaaaaccccggtggacgacccgatgagtctgctctacaacatgaacgactgctactccaagctcaaggaactggtgcccagcatcccccagaacaagaaggtgaccaagatggaaatcctgcagcacgtcatcgattacatcttggacctgcagatcgccctggactcgcatcccactatcgtcagcctgcatcaccagagacctggacagaaccaggcgtccaggacgccgctgaccaccctgaacacggacatcagcatcctgtccttgcaggcatctgaattcccttctgagcttatgtcgaatgatagcaaagtactctgtggctaaataaatggcatttggggactttttcttttctttttactttctctttttcttttgcacaagaagaagtctacaagatcttttaagacttttgttatcagccatttcaccaggagaacacgttgaatggacctttttaaaaagaaagcggaaggaaaactaaggatgatcgtcttgcccaggtgtcttgttctccggcctggactgtgataccgttatttatgagagactttcagtgccctttctacagttggaaggttttctttatatactattcccaccatggggagcgaaaaggttaaaaaaaagaaaaaaatcacaaggaattgcccaatgtaagcagactttgccttttcacaaaggtggagcgtgaattccaggaggacccagtattcggttacttaaatgaagtcttcggtcagaaatggcctttttgacacgagcctactgaatgctgtgtatatatttatatataaatatatatatattgagtgaaccttgtggactctttaattagagttttcttgtatagtggcagaaataacctatttctgcattaaaatgtaatgacgtacttatgctaaactttttataaaagtttagttgtaaacttaacccttttatacaaaataaatcaagtgtgtttattgaatgttgattgcttgctttatttcagacaaccagtgctttgatttttttttatgctatgttataactgaacccaaataaataccagttcaaatttatgtagactgtattaagattataataaaatgtgtctgacatcaaaaaaaaaaaaaaaaaaaaaaaaaaaaaaaa

SEQ ID NO: 180 - DNA, 969 bp, Mus musculus
gcactgtttgctgctttaggtgtctcttttcctccctctctatctctactctccaacatgaaggcgctgagcccggtgcgcggctgctacgaggcggtgtgctgcctgtcggaacgtagcctggccattgcgcgaggccgcggtaagagcccgtcgaccgaggagcctcttagcctcttggacgacatgaaccactgctactcgcgcctgcgggaactggtgccgggagtcccgcgaggcactcagcttagccaggtggaaatcctgcagcgtgtcatagactacatcctcgaccttcaggtggtcctggcagagccggcgcctggacccccggacggtccgcatctcccgatccagacagctgagctcactccggaacttgtgatctccaaggacaagaggagcttttgccactgacccggtcgtcctggcacctcccgaacgcaggtgctggcgcccgttccgcttgggaccctgggactctgggactctgggaccctctctccagccggaagcctgagggcatggatgagcttcgatcttaacccagccctcttcacttaccctgaactcaacgcctcgaggctggacctggagcccgagagaaggactgaacttgggtggcctgaagagctagcacacgctggtcagcagctgggcaacgtcactctgtccccaccctgactcaagtctaaaagactggcttttccgagaatggggtgtcgagagggtgtggggggatgcgagtggctgccctgcgcactctgccaaggcagcataagagctgttcttctggtttccttggagaaaagctctgctgccctgattatgaactctataatagagtatatagcttttgtaccttttttacaggaaggtgactttctgtaatcatgtgatgtatattaaactttttataaaagttaacattttgcataataaaccatttttgaacaaaaaaaaaaaaaa

SEQ ID NO: 181 - DNA, 4391 bp, Mus musculus
gatttgcttgaaggaaaaaaaaaaattcttgtactgtgagactttaagaagcacaaaatgggcgttagacgggtcttacatttggtgcattgaccgggaatcgtcctgctggcgggtccagtgacaggagaccggaggattgttcgagcaggttaaaaggcctgcagctggtgcagagagaagtgtgatcacagctggcagctgcatatgagcctgatactcctaagacatcgcatcagttcgaggttggagattcattctacgtgaggcaacatcgtgcccagaggctcgagccccattggaaaggatcctatctagtactgctaactactccaacggctgtcaaagtggatggaattgctgcctggatacatgcctcacatgtgaagccagcccccttagctgagaccagaattccaggaaaccaccctgtctggaaggcccaggctacggagaaccctctgaaagtgaagatcgtcaaagggtccaaagatgcaagcccttcccctggtactgtatcttagtttcttctccttatattctgcagaccttggtccccaccagccacgcaacctaacgtggcaggtgatatcaggggctggagacactatttggagtctatccaaggttaccactccatctacctggtggcctgaccttttccctgacatctgtaagttggctataggagcacctcctggatgggacttggaggggtactctgacattcagagggcaccttcaacaccccctccgtatgtagaaaaacatccaagagacccatggggtggttgctctaaccaaagggatagaagcatgcttcgaatccaccccttctatgtctgccccgggccccaccgaagtcagtccctcaatccaaaatgcggaggtaagactgacttcttctgcaagagctggggttgtgagacttcaggtgaagtctactggaagccctcctcgagctgggactatattaaagtaagagccaactattccctagagtcttacgtacctggaggatttgacctagacgagtgtaccgactggtgccatccactccgtgtcaccttcactgaaccagggaaaagagctctagaatggacaaaaggatacacctggggtcttaggctttataaggaaagatatgatgagggattattgttcactatcagattaaaaatagagaccccctacaatcctttaggccccaacaaagtcttggccccagatgagataaatcccaggccaacacccccctctagttccaggccaacacccccacccaattctcgtggtactgtggctccttcaaaaaggatcacggagactgtttccctttaatcgcctgggcaatctcatttaactcatctagttcaagaagctttcagaattatcaacagcaccaaccctgaagccactaaatcatgttgactctgtttatgatgtagctcctccttactatgaaggcatggtatttataaaaatgctaaaatcactctgatgccacaacataccagtggcagcagcagagcgccagacttaaccttgtcagctataactgggcagggactgtgtgtgggaaaagttcagtcttgttgggggtggggctgggagtggcaggggctgctatgggatcatctgcactggccttgcagacccagagttaccaaagtctgagggctgccatagatgctgatattgtagagatggaaaactccatctctaagctccaggagtctctgaccttgctgtcagaagtggtcctccaaaataggagaggcttggatctcctgttcctccaacaagatctgtgtgcagccctaaaagaagaatgctgcttctacatagaccactctggagtggtaaaagattcgatggccaaagtgagaaaggggctggcgaaaagaaagagagaaagaaaacagaaccaggggtggtttaatcttggtttaactctttccccgtggcttcacgaccctgatttctatccttctgggaccattgctaatcctgatgttgcttttaacttttgttccctgcattttaaattgcttgctagcttttattagagaacacataagcacagttcagattataatgctgagacaacagtatcaagagttaagtcagggggctggtgagatggctcagcaggtaagagcacccgactgctcttccaaaggtcctgagttcaaatcccagcaaccacatggtggctcacaatcatccgtaatgagatctgactccctcttctggtgtgtctgaagacagctacagtgtacttacatataataaataaatgaagagttaagtcagaatgagctataatttcatgactgaaatacaagaaaaaggggggaatgtgaaagtttaagaagcacaaaatggctgctagaaggaggatcttgccagaaataagactttgggtacagaaggattatgactaattcctcttcccagaatgtcccagaaaaacaggaaggcctttactgcagagcagggtgggccaggtgcagataattcagttcccctttgaagataacaaagacctcaccccacttagaacaaccaatgctgagaaaggtcgatacagactactaataagctttaaccaactcatactgttgctgaagtctgcccccaagaactgtataaaagatgcttgaaatgttcagggtagcctctgccctaattgcaggatggccccaatgcgctggatcattaaacctcttgcttgttgcatcgatctccgtctctgtttctgtgagtgggcctccctggacgtaaggctctaagggtcttacagtaccccttttggaaatggatgatttaacctacacagctagtcccctaggactagaagactaatttgcaacgaaaaggaaacctttttcctgttgtctatcatgcaagtaacctccatggttacagtatgggaagaaagaggaatgcagactgcaccagaattgtcactacaatgctaaaattagtgagaaggtcctgtggtactttgtatgttatttcttgatgttcaaggctttcttggatagaatctgagatggataatctctccagatcacatcgatctaatactagagttcacctaccttacataacattttattccttgccaagaagtacaatttcctcaattataaggggtttaaccacgaccttgacaaattaatttcttggccattagattgttttaatagatattctattattgttgttgtttgtagcctaaccttgatccaactaatagaaactccaaaaggcaaaactgtgaagtacttttcttcagttaattagagagcaagactggttgttttccctgctttcttttggttatgcagcttcctaaaatgatggaatttgtaattataaaatacattacctttgacatagtaagctcaatgcccttaatttatcctaaaagcataatctaaaagtgaattcctcagttgacaagtttcagttgtaacactgaaaatttatagtctttagtctagtaatggggtacaagttctaatttatcagttcaatagattattcagtaaaatgatttttaaaaataagctgtttccaagaaaaaaatatgtcctgtgaaatttgttttataaaagcagactccaggatctgaagagggtggaccagtggttaagagcacttgcttctcttgtacaggacccaggttacattcctagcacccatatgggactcataaccatcggtaactacaatttctagggttcctttcatttatgtgaccttaaagaaagggatatattaaagccccagaactagggtgtcctagattctaactccctcctggtaattttacattaacagttgtgaaataaaacataaaagctacagttcattgttaaagaatgaatgtttataaatcaatatccaaaatagttgcacacatctgttttgacttgaataaaaaaaatcacattgtgacaaagcttataaccttaacttaagatatatgaatattaacatttactaatattatttacatattttatttacatcatcaacaaattggatgaaaaacaggctatgttattactttaacacagtaggttatgactagtctttgaaaattgatccacaaaatgtgtactgtatttcattacaaaacatacttcaaataattcagaattcctaaaggattctactattcacagaaaaacttccagaaaggtctcatttacaaacaaaacgggagcagttgtatttaatcttaagagacttcagaactgcctcatttaaaaataggaaaattcttgtggtatatctttaaagcatattcttttactcttcacatcaaaattaattaattgaacattaagcatctaataaaaagttatatatattcc

SEQ ID NO: 182 - DNA, 2581 bp, Mus musculus
gctcagttgctacaaactgctcagcactgaaggagcctgcagcgctcaccgtcaggaaggcaaaccacagcccaggaagccctgaggtcacttggtcgctctcctcaagaccatggatgtgcacttgtttgactatgcagagcctggcaactactctgacatcaactggccatgtaacagcagcgactgcattgtggtggacactgtgcagtgtcccaccatgcctaacaagaacgtgcttctgtataccctctccttcatctacattttcatcttcgtgatcggcatgattgccaactctgtggtggtctgggtgaatatccaggctaagaccacaggctacgacacgcactgctacatcttgaacctggccattgcagacctgtgggtcgtcatcaccatccccgtctgggtggtcagtctcgtgcagcataaccagtggcccatgggggagctcacatgcaagatcacacacctcattttctccatcaacctctttgggagcatcttcttcctcgcctgcatgagcgtggaccgctatctctccatcacctacttcaccggcacctccagctataagaagaagatggtacgccgtgttgtatgcatcttggtgtggctgctggccttctttgtgtccctgcctgatacctactacctgaagacggtcacatctgcttccaacaatgagacctactgcaggtccttctaccccgagcacagcatcaaggagtggctgatcggcatggagctggtctctgtcatcttgggctttgctgtccccttcactatcattgcgatcttctacttcctgctcgctagagccatgtcagcatcaggcgaccaggagaagcacagtagccggaagatcatcttctcctacgtggtggtcttcctggtatgttggctgccgtaccattttgtggttctgctggacatcttctccatcttacactacatcccgtttacctgtcagctggagaatgtgctctttacagcgttgcatgtcacccagtgcctgtccttggtgcactgctgtgtcaaccccgtgctctacagcttcatcaaccgcaactacaggtacgagctgatgaaggccttcatcttcaagtactcggccaaaacaggtctcaccaagctcattgatgcctccagagtgtcagagacagagtactctgccctggaacagaacaccaagtgatccatcattctgcagaggtcggggggacacgtgcatgttgcaaatggggcggctgggtcctgtggtttcttcaagaaagcaatgtagctttgggtctggttgcttgagtggtatgaagaggagaaggcatgtgaccatgcttcctgtctctcattctccagccaagatggctgccgcctggatgcccatcctgacagctggcagctggcagctggcagctggcagcaggcagggctgtgctgtgctgtgctgtgctgcgctgtgctgtgctgtgcagccagagctgcgtatcaaagccagcaccaggacaggctcttatggacatgtgtacagtagaatcttctgtgtttcttcaagtttttacttggtgactttttgtatttaagttttaagactttattttctcactatggatgtaccttataaatgtatttgaaagctaaatatattttaaatattgtatgggaggtgtaaggctgttgtattcagaccatgtaggcctcagattagctggacttgagttttgactaaggatgacattaattgttagctgatttgaaattatatatataaatataaaaatatatataaatttatgccagtctcggctgaaaggttttatttacaatagttttatatctgtgcaatgtttaatgctggcacagcatatgaaacaacaactgcccagcaatgcagtttgttacatgaaccatattgtagagttacacttcgggctgcaaacccgtgaacaagggaaacagagcgttctgttgatttgtaagttatttttttaataaagattttgtttcctaaaacctcatgtgtgctttgggtttgaaagcatgtttgggctttggatggcatgcatagcactaacacatggaaaaacatgtcagacacaggcaagaagaagatgttcagtgggagagaacggccagagagcccaaccatgggactgggtggatggatctgagcagggtgggtgctattccttggttcctgaaggaacattttcaaaaacatttgagttcaggggaggatgagcaggtcagaggtaggtgcatttcaatggctgttgagtgaaacttgctgtaaaagttgtgctgcccactgtctactcaggaaatcatgtccttatcttaacaaacatctgcctgccgtcttccccagccacatgtccatcagaccatcctgctgagggcatgaggttaggtgtcagcgagctgtgtatgctgtatgactctccaagcccaaagcaccttcaggcccagcactctagagtcagaggcaggtggatctctgtgaggttgaggccagggccaacctgatctacacagtgagttccaggctagccaggcctgtgtagtaagtctgtgtctg

SEQ ID NO: 183 - DNA, 1096 bp, Mus musculus
gcagacggcgggacagacggctgggtgtgcagcgacctcgaacccgtgagccagaaagcagagcttctgcgtcccagggactccagtacaccaccatggcggattctgagcgtctctcggcccccggctgctggttagcctgcaccagcttctcgcgcaccaaaaagggaattctcctgtttgctgagattatactgtgcctggtgatcttgatttgcttcagtgcatctacaacatcggcctactcctccctgtcggtgattgagatgatctgtgctgctgtcttacttgtcttctacacgtgtgacctgcactccaagatatcattcatcaactggccttggactgacttcttcagatccctcatagcaaccatcctgtacctgatcacctccattgttgtccttgtagaaggaagaggcagctccagagttgtcgctgggatactgggcttacttgctacgttgctctttggctacgatgcatacatcaccttccctctaaagcagcaaagacatacagcagctcccactgaccccactgatggcccgtgatcgtctttcagctgtctctgctacctgtcaatagctcctccatcaaaaactttcctcctgtcgggcggtggtggtgctcgcctttcctccaagctctcaggaggcagaggcaggtggatccctgtgagtttgaggccagggctacacagtgagatcctgtctctaaaacaattccttctccggtttccacaacactccagccaattctctgaccccattgaaagtgcttatggtacaagagattgaacctagagccgtgtgcatactaggcaagtattctccactgagctacatccctgtaaaagtgcctttattgggagttttgtcttccagcctgccaatcaacccatctgggtgtggccacctttatgggtgtgcctagattcccctttgctctgcagtaccagcagccgacatcagttctgcttgaaccatatccccacataagctacaaaatgagtgacccactacaaataacctttttctctgtgtggggtgagctgtgaagggctaaataaacaataaaaataatgtttaagtcc

SEQ ID NO: 184 - DNA, 944 bp, Mus musculus
gctgttggtgaaaagtcccagaagtgcacaggctcggcaggacaacttgcagcccttctccctggattcagtcatttgaagactgagaccaagattggaagcatggccgacctcaggcagctcatggacaatgaggtgttgatggcctttacctcctatgcaacgatcattcttaccaagatgatgttcatgagctctgcgaccgcattccagaggataaccaacaaggtttttgccaacccagaagactgcgctggctttggcaagggagagaatgccaagaagtttgttcgcactgacgagaaggtggaacgcgtgcgcagagcccacctgaatgatcttgaaaacatcgttccctttctcggcatcggcctcctgtactccctgagtggaccagatctctctacagccctcatgcacttcagaatctttgtaggtgctcggatctaccacaccattgcttacttgactccccttcctcagccaaacaggggcttggcattttttgttggctatggagttactttgtcaatggcttacaggctgctaaggagcagactgtacttgtaaagagaattgtgatcttcaccttctaattgattctttttaaaaaaagaattcctatattttcagtggattcaaactctttctgaggttttaatgcgtgaaaggagcagagaaattaggaatcagggaaaattcagttaaaagactagcatcagtaggctctattcttttgtatttgggttagaaatttaatataatcagccttaactatgttgtctaactcctaaagtactttgttataaagtcttgatttcatcataatttgttacatttgtctatatttcctacggtgcatctataaagagtgcacacacctatgggaaacctaggtttcattatagctgaagtagacacatgaattaaaaacattacaaatg

SEQ ID NO: 185 - DNA, 1274 bp, Mus musculus
ggatgggcctccattgtcttggtggcctgccgtgattctgggagagtgtccttcttggtgcggactgtgatggtcaggggttggcggctgttgggtgtgttgatgcttagcgggctttcaagtcccgggatgtccagaccctacaaccatggctccgagaggcccatcatcggagtagtaatgcaagaatgttttgggaaaatggcgaagttgggaaactactacattgctgcatcctatgtgaagtatatagagtctgcaggtgcacgagttgtgcccataaggcctgatcttagtgatgcagagtatgaagaactttttagatctattaatggagttctccttcctggaggaggtgctaacctaacagattcaggttattcccgagtggccaaaatatttttcagcaaggctctagagagctttgataatggaggccattttcctgtgtggggaacatgccttggatttgaggagctttctgtcctggttagtggagagaacttactaacgagtacagacactaagtcaaagaaattgcccttgaacttcactgaaggtgcaaggaaaaacaaaatgttcaaacattttcctactgagttattggattcattagcactagaaaatctgaccgcaaattttcacaaatggagcctctctgtgaagaattttacagaaaatgaaaagttaaagaagtttttcaatatattaacaaccaatacagatggcaaaactgagttcatttcatccatggaaggatttaagtatccagtgtatgctgtccagtggcatcctgagaaagcaccatttgagtggaagaatctgggcggcatttctcatgcaccaaatgctgtgaagacttcattctacttagcagaatttttagtttctgaagctcggaagaacagtcaccactttgagaacgtggttaaggagacggcatccttgatttacaaggtctatcccatttatactggaaatatttcttcatttcagcaagcttatatgtttgactgaaattcttcaatatggtaacccagcagctttgagtaattctgtgattgaattgctaacacagctcagggcagtgtgagaaagccacacagatatctttgctgtgtgcctggttctgattcctggcttaatacatgattgtttttatcagatttgataacctgacaatgaaaaatataaaaaatcagagtgtttttcatgaaaatgccttcttatgtctgaagattctaaaatacaagtttttgaaaaaaaaaaaaaaa

SEQ ID NO: 186 - DNA, 1807 bp, Mus musculus
atggcgaccggcggctaccggagcggcggcagcaccaccacggacttcctggaggagtggaaggcgaagcgcgagaagatgcgcgccaagcagaaccccgcgggcccggggtcgagcggcggggatccagccgccaagtcccccgcgggatcgctgaccccgaccgcggacgagtgccctagcgccgctgcggcctcgggagcgcctgggtcccggggcgatgaggaggagccggatagcgcccgggagaagggccgcagctcgggacccagcgccaggaaaggcaaggggcagatcgagaagaggaagctgcgggagaagcgccgctccaccggcgtggtcaacatccccgcggcggagtgcttagatgagtacgaagatgatgaagcaggacagaaggaacggaagcgagaggatgccatcacccagcaaaacaccatccagaatgaagctgcgaccctcccagatccaggcacatcctacctgccccaggacccgtcgagaacagttccaggcagatacaaaagcacaaccagtgccccagaagatgaaatctcaaatagatatccccgaacagacagaagtggtttcagtagacacaacagagatgcaaatgcgccggctagtttctcctcaagtagcaccttggaaaagagaattgaagatcttgaaaaggaagttgtaagagaaaggcaagaaaaccttcgacttgtgaggctgatgcaagataaagaagaaatgattgggaaactcaaggaagagatcgatttgttaaatagagacctagatgacatggaagatgagaacgagcaactaaaacaggaaaataaaactcttttgaaggttgttgggcagctgacaagtcttattgaactacaagtagttcctgatggctctcctatcgtgaacactgataataataaccatggtattgtcatggcacagagacagccatccttccctcagtcacatacatcaaagctggcgtctgacaacttcacgatcgtgggcagccccacaatcaaacattgtgtgttcggttatcctctagacactgaagggaattattcagccccggaacgacaggggctggcagctgccaacccacacatccacgagagtaccacgggatttataaggacagccgtcagaggagccagaaactacatcgagagcgcaactgctttcgcaacagcctttgtgacaactagagtcgctcaagagaatgatttcttttctgagatggactctggggctccacccttctcaactcagccgttgttctacaatatatctggccttcgatggagacttaccttgcaaagctgtggtagctggatcccaggttctgtgtgggaatttgttccagttgggtttggttttgtccggcagaaagcagacagggaaataagagcttgcagaaattccgaaccattgaacggtctgctgtctccagcacgcaggagcccattctgcctcccagttccagcttcaggagggccaccctccatccagacatcagggttgcgtttcagcaaacagcaaggaagaatcagaagcaaagggtatcttttgttctcgtttccagtgaactccctctgtgagccctcactggccaaacttacgtacatgacacggagatcacctggaggaccaaggatgtacgcaggcaaatgggaatcaaatgtcccttgctgcagatgaagcagctttggagagtggccacctttcagtaacgagagcattagtaacttcagctcagatatgaaacaaaccatctgcttgaagatgaacttgcaacatcgcc

SEQ ID NO: 187 - DNA, 5646 bp, Mus musculus
ttttaatcgcttccctcttataaatctcttcccccaagtgcaccagcataaccgggacactcactgtcccctttctagctctcttctcaataacccttcaagattatgtcaatcggtctgaagggacctgggattccctgcgggtgctgacggagctgcgggagccagagaagaatgcaagtgcgtggagtgtgcctggctgccggctggttcttactggccctgtgtctgtgggggcagcccgcagaggctgcggcctgccatgggtgttcttctggatcaaaatgtgactgcagtggtataaaaggagaaaagggagaacgggggtttccaggtttagaaggtcatccaggtttaccaggatttccaggtccagaaggccctccaggacctcggggacaaaagggtgatgatggaattccagggccaccaggaccaaaaggaatcagaggtcctcctggacttcctggatttccagggacaccaggtcttcctgggatgccaggccatgatggggctccaggacctcaaggtatccctggatgcaatggaaccaagggagaacgtggatttccaggcagtccgggctttcctggtttacaaggtcctccaggacctcctgggatcccaggtatgaagggggaaccaggcagtataatcatgtcaccactgccaggaccaaagggtaatcaaggatacccaggtcctcctggaatacaaggcccacctggtcccaagggtatatcagggccaagtggtcctccaggaccaccaggtttaatgggacctcctggcccaccaggcccaccgggaccaaaggggaatatgggcttaaatttccagggacccaaaggtgaaaaaggcgaacaaggtcttcagggcccacctggtccacctgggcagatcagcgaacagaaaagaccaattgacatagaatttcagaaaggagatcagggagttcctggtgatagagggcctcctggacctccaggaatacctggtcctcccggtcctcctggtggtgtgaaaggtgaaaagggtgagccaggagaggcaggcaaaagaggtaaaccaggcaaagatggagagactggccaaccaggaatcccaggtttgcctggtgatcctggttaccctggagaaccaggaagagatggtgaaaagggtcaaaagggtgatattggcccacctggacctcccggacttgtaattcctgcacctggaactggtgtgactatgggagaaaaaggaaatatcgggttacctggtttgcctggagaaaagggagagcgaggatttcctggaatacaaggtccacctggctttcctggacctccaggaacagcagttgtgggtccccctggtcctcctggatatcctggtgaaaggggccagaaaggtgatgaaggtccccctggaatttgtattcctggatctcctggacttgatggacagcctggggctcctggccttccaggacctcctggcccccctggcccccagttgccatccagagatgaaatctgtaaagcaggccctcctgggcctccaggacctccaggtgataaaggactccaaggagagcgaggagtaaaaggtgacaaaggtgatacttgcttcaactgtattggaactggcatttcagggcctccaggccaacctggtttaccaggtctcccaggtcctccaggatctcttggaatccctggagagaagggggacaaaggacaagctgggataactggtccgaaaggattgccaggcatacctggacctccaggtgctccaggctttccagggtctaagggtgaccctggggatgtcctcactcttccaggaatgaaaggtgacaaaggagagttgggtttccctggagctccagggcttcctggtctacctggtagtcctggaaaggatggtttgccaggactccctggccccaaaggagagcctggtggaattacttttaagggtgaaagaggtcctcctgggagcccaggtttaccaggtctcccaggaaatatgggacctacaggcccagttggttttgggcctccaggccccataggcgaaaaaggcatacaaggtgtggcaggaaatccaggccagccgggattaccaggtcctaaaggagatccaggccagaccataacccagccaggaaagcctggtttgccaggtagtccaggcagagatggtgaagtgggtcttccaggtgatcctggacttccaggccaaccaggcctgccaggaatacttggtagcaaaggagaaccaggtatccctgggattgggcctcctggaccacctggtcctaaaggttttccaggaattccgggacctccaggagctcctggggcccctggaagaatgggtccagatgggcctcctgggccaccaggcttcccaggaccaaagggagagccaggatttgggttacctgggccacctgggccaccaggattcccaggtttcaaaggaacacctggtccaaaaggtgatcgtggtttcccaggaccttcaggtcctccaggacgcactggcttggatgggctacctggaccaaaaggtgatgttggaccaaatggacaacctggcccagtagggcctccagggctgccaggaattggtcttcagggaccaccaggaccaccagggactccagggccaataggccaacctggcttacatgggattccaggagagaagggggacccaggacctcctgggtttgatgttccaggactccctggagagagaggtagtccagggctccctggagcccctggtcttataggacctccaggatcacctggtgtccctggaaaagcaggtgtccctggatttccaggtgtcaaaggcgaaatgggtatgatgggacctccaggcccacctggacctttgggaattcctggcaggagtggtgctcctggtcttaaaggtgatgatggcatgcaaggtcagccaggtctccctggccctgcaggagaaaagggcggtaagggagagcctggccttccaggtcctcctggaccaatgcatccagatttcctgggatcgaaaggagaaaagggtgagcccggcttaccaggtattcctggactttcaggaccaaaaggctaccagggattacctggagacccagggcaacctggactgagtggacaaccaggatcaccaggactcccaggtcccaagggtaatcctggtctccctggtccaccaggacttacaggacctcctggaccaaaaggaaacattggtgacatgggttttcctggccctcaaggtgtagatgggccccctggacctcctggatttcctggacaacctggctctcctgggttacctggccagaaaggaagtaaaggagagcctggggtttcaggcattggacttccaggtcttcctggcccaaagggtgaacctggtctgcctggatatccaggaaacccaggtatcaaagggtcggtgggagagactggtcttcctggattaccaggaaaccctggagcaaaaggtcaaccgggcctgcctggattcccaggaacaccaggacttcctggaccaaaaggtatgaatggtcctcctggtaaccctggctttcccggagaacctggtcctgtaggtgccggagggcgtcctggaccaccaggacctcctggtgaaaaaggcaagccaggtcaagatggcattcctgggccagcaggacaaaagggagaaccaggtcaaccaggctttggaatcccaggacctcctggactcccaggactttctggacaaaagggtgatggaggatcacctggacttccaggaaatcctggccttccaggttcaaagggtgagccaggctttcagggattccctggtatgccaggtcccccaggtcctcctggttctcctggtcaagctttggaaggtcccaaaggaaaccctgggcctcaaggccctcctgggagaccaggtcctccaggttttcaaggtccaccaggtacagaaggtcctcgtggaccccctggaaatggaggtatcaaaggagagaggggaaatccaggcccacctgggcagccaggcttacctggtttgaaaggagatcaaggaccaccaggactcccgggtaaccctggccggccaggtcttaatggaatgaaaggagatcctggtctccctggtgttccaggattcccaggaatgaaaggacccattggagtaccaggctccactggccctgatggggaaccaggtcttactgggcccccaggtcctcctgggttgcctggtccttcaggacagagtattgtaatcaaaggagatcctggacctccagggattcctggacaacctggattaaaaggtctaccaggacttccaggccctcaaggcctaccaggtccaattggccctccaggagatccaggacgcaatggactcccaggctttgatggtgcaggagggcgcaaaggagacccagggctgccaggacagccaggtgcccgtggattggatggtcccccaggaccagatggattgcaaggacctccaggaccccctggaaccacctctgttgcccatggattcctcatcacacgtcacagtcaaacaacagaagcaccacaatgcccacggggaacagttcatatctatgaaggcttttctctcctgtatgtacaaggaaataaaagagcccatggtcaagacttgggtacggctggcagctgccttcgtcgcttcagtaccatgcctttcatgttctgcaacattaacaacgtttgtaactttgcttcaagaaatgactattcttactggctttccaccccagagcccatgccaatgaacatggaacccctgaagggacagagcatccagccattcattagtcgatgtgcagtgtgtgaggcgccagctgtggtgatcgctgttcacagccagactattcagattccacactgtcctcaggggtgggactctctgtggattggctattccttcatgatgcatacaagtgcaggagcagaaggctctggccaagccctagcctctcctggctcctgtttggaagaatttcgttccgctcccttcatcgaatgtcatgggcgagggacatgcaattactatgccaattcgtacagcttttggctggccactgttgatatgtcagacatgttcaacaaacctcagtcagaaaccctgaaagcaggagacttgaggacgcgtattagccgatgtcaagtatgcatgaagaggacataacttgttgaagagttccttgtgttttttttaatgtgattatatatatatacatacataaactattatatgtgattcccaggatgcaatgtctcactcactctccccacctttaccactgctcccaccaatggtgctaatatcctctatgacgaagagaacatgctgactagcaaccatgaagattcagatgtacctcagcaatgtgccagagcaagggctccatccttccttatgaaagcaataggaaagtgactatacttctggggctccaataaattccttcaaggattgtaaggcgaagttcatatgctttgcctagttactgaaatggcacatcaaaaattcaatgaagagaagagttatactgagtaaaagtactgagtgcggtttgaggaa

SEQ ID NO: 188 - DNA, 3480 bp, Mus musculus
agacgcttctgggtgcggtagggaagcgctgtagcctggctgtgcgagagacggggagagcccagcgccacagcgacctggagaaggatggcggccaccgggaccgcggccgctgcggccaccggcaagcttcttgtcctgctgctgctcgggctcacggcgcccgctgcggctctggctggctacatagaggctcttgcagccaatgctggaacaggcttcgctgttgctgagcctcagattgcgatgttctgtgggaagctgaatatgcatgtgaacattcagactggcaaatgggagcctgacccaacaggcaccaagagctgccttggaacaaaggaggaggttcttcagtactgccaggagatatatccagagctgcagatcacaaatgtgatggaagcaaaccagccagtcaatattgatagttggtgccgaagggacaaaaggcagtgcaagagtcacattgttataccattcaagtgtcttgtgggtgaatttgtaagtgatgtcctgctagttccagataactgccagtttttccaccaagagcggatggaggtgtgtgagaagcaccagcgctggcacacgttagtcaaggaggcatgtctgactgaggggctgaccttatatagctatggcatgctgctgccctgcggggtagaccagttccatggcaccgagtatgtgtgctgccctcagacaaagactgttgactcggactcgactatgtccaaagaagaggaggaagaggaagaggatgaagaggacgaagaggaagactatgatcttgataaaagtgaatttcctactgaagcagatttggaagacttcacagaagcagcagcagatgaggaagaagaggatgaggaggaaggggaggaagtggtggaagaccgtgactactactatgacccctttaaaggagacgattacaatgaggagaatccaaccgaacccagcagcgagggcaccatttcagacaaggagattgttcacgatgttaaagttcccccgactcccctgccaaccaatgatgttgatgtgtattttgagacctcagcggatgataatgagcacgcccgcttccagaaggctaaggaacagctggaaattcgacatcgaaaccgaatggacagggtaaagaaggaatgggaagaggcagaacttcaagccaagaacctccccaagacagaaagacagaccctcatccagcatttccaagctatggttaaagctttagagaaagaagcagccagtgagaagcagcagcttgtggaaacccatctggcccgagtagaagccatgctgaatgaccgccgacgcatagctctggaaaattacctggctgccctgcagtctgacccacctcggccacatcgcattcttcaagctcttcgtcgttacgtccgtgctgagaacaaagatcgcctgcataccattcgtcattaccaacacgtgttggctgttgacccagaaaaggccgcccagatgaaatcccaggtgatgacacacctccatgtgattgaagaaagaaggaaccaaagtctttctcttctgtacaaagttccttatgttgctcaagaaattcaagaggaaattgatgagctccttcaggaacagcgagcggatatggaccaatttacctcctccatctcagagaaccctgtggatgtccgggtgagctctgaggagagtgaggagatcccgccgttccaccctctccatcccttcccatccttgtctgagaatgaaggctctggaatggcagaacaagacgggggactgattggtgcagaagaaaaagtgattaacagcaagaataaaatggatgaaaatatggtcattgacgagactctggatgttaaggaaatgattttcaatgctgagagagttggaggccttgaggaagagccggaatcggtgggacctttaagggaggatttcagtttgagcagcaatgcccttattggcttgctggttatcgcagtggccattgctacggtcatcgttatcagcctggtgatgctgaggaagaggcagtacggcaccatcagccacgggattgtggaggttgacccaatgctcaccccagaagagcgtcacctgaacaagatgcagaaccatggttatgaaaacccaacctacaaatacctggagcagatgcagatttaaggacagcgtgtgtgacaccctggctgaggctgctgcaggtgggctggaagaggctcagcgtttgtgcttgactgctgaccaccagtggtgccagaaggcctcatcctacatcctgctctcctggattgttaagactataaagtactactgtaggattgcaatttccattcttttaaatgggttaaaaagatgttaatataacaatatatgatatataaaccttaagtgaaatgaaagaaaaagatctattgcagatatctgatggatgtagttttctttttttaaattagaaatgccacttctattgtattgtctcacacatgctctatataaatgggaaatgttgatttttttgatgatagactatatacacaggctgttcccgttatgtaagtcagttcttcaggctcatttgctgtgctggttttactattatttgttttcaatgtataaaggcagtatttcccttttcaggttgctgagaaatgtaagaggagctgaagtacattgtatgcagttactgactgctttaggcatagtctccgcagaagcctcgtgtgtccagtgctgggtgtttgggtgcttctgtaccagccgtccccaagcagggctaaggcaccttgaactagccagatgcaacatagattcactgtgctttcctttcaaatcagttcttccacagcaactagcccatagtcagtctgtgttcttccacagttgtttacggtagccttttcctatccacttcccttaaccgaagtgtatccaagcgtgcacccacctcctcattggatggctccctccatgcactgaccctctgcctgcctttgtacctcactcacctccaccgctctccagcccctctgatggccactcagagaataccataataaacatggctgaggaccaggagagttcacgggaggcttatcatatgaagacaatgttctggttgtgcatgaaattggatctgtagacactgtggaacgttgaaagtgttgttccttcatatgaacctgtaaaatgctgtgtagctggagttcacgctcacagcctttagcgctttgttgcttgttttgttttaatctgaaggttctggtaacctgtttttgtttgtttgtttatttgttttggtttggtttttgtacttttctgtgactcacctgcccttccttccccccttggccctagccgtgcctcgtcccactatgcacagattgaaacttcacctacaaacctgttagtgtgatctgtggagaatgtacagaaattaactacatcaataaacactttaacgtcccctga

SEQ ID NO: 189 - DNA, 5087 bp, Mus musculus
gcctctgcccacccctgccccttaccccttcattccttccacctttttccttcactatgggaccagcttcagggtcccagctactagtgctactgctgctgttggccagctccccattagctctggggatccccatgtattccatcattactcccaatgtcctacggctggagagcgaagagaccatcgtactggaggcccacgatgctcagggtgacatcccagtcacagtcactgtgcaagacttcctaaagaggcaagtgctgaccagtgagaagacagtgttgacaggagccagtggacatctgagaagcgtctccatcaagattccagccagtaaggaattcaactcagataaggaggggcacaagtacgtgacagtggtggcaaacttcggggaaacggtggtggagaaagcagtgatggtaagcttccagagtgggtacctcttcatccagacagacaagaccatctacacccctggctccactgtcttatatcggatcttcactgtggacaacaacctactgcccgtgggcaagacagtcgtcatcctcattgagacccccgatggcattcctgtcaagagagacattctgtcttccaacaaccaacacggcatcttgcctttgtcttggaacattcctgaactggtcaacatggggcagtggaagatccgagccttttacgaacatgcgccgaagcagatcttctccgcagagtttgaggtgaaggaatacgtgctgcccagttttgaggtccgggtggagcccacagagacattttattacatcgatgacccaaatggcctggaagtttccatcatagccaagttcctgtacgggaaaaacgtggacgggacagccttcgtgatttttggggtccaggatggcgataagaagatttctctggcccactccctcacgcgcgtagtgattgaggatggtgtgggggatgcagtgctgacccggaaggtgctgatggagggggtacggccttccaacgccgacgccctggtggggaagtccctgtatgtctccgtcactgtcatcctgcactcaggtagtgacatggtagaggcagagcgcagtgggatcccgattgtcacttccccgtaccagatccacttcaccaagacacccaaattcttcaagccagccatgccctttgacctcatggtgttcgtgaccaaccccgatggctctccggccagcaaagtgctggtggtcactcagggatctaatgcaaaggctctcacccaagatgatggcgtggccaagctaagcatcaacacacccaacagccgccaacccctgaccatcacagtccgcaccaagaaggacactctcccagaatcacggcaggccaccaagacaatggaggcccatccctacagcactatgcacaactccaacaactacctacacttgtcagtgtcacgaatggagctcaagccgggggacaacctcaatgtcaacttccacctgcgcacagacccaggccatgaggccaagatccgatactacacctacctggttatgaacaaggggaagctcctgaaggcaggccgccaggttcgggagcctggccaggacctggtggtcttgtccctgcccatcactccagagtttattccttcatttcgcctggtggcttactacaccctgattggagctagtggccagagggaggtggtggctgactctgtgtgggtggatgtgaaggattcctgtattggcacgctggtggtgaagggtgacccaagagataaccatctcgcacctgggcaacaaacgacactcaggattgaaggaaaccagggggcccgagtggggctagtggctgtggacaagggagtgtttgtgctgaacaagaagaacaaactcacacagagcaagatctgggatgtggtagagaaggcagacattggctgcaccccaggcagtgggaagaactatgctggtgtcttcatggatgcaggcctggccttcaagacaagccaaggactgcagactgaacagagagcagatcttgagtgcaccaagccagcagcccgccgccgtcgctcagtacagttgatggaaagaaggatggacaaagctggtcagtacactgacaagggtcttcggaagtgttgtgaggatggtatgcgggatatccctatgagatacagctgccagcgccgggcacgcctcatcacccagggcgagaactgcataaaggccttcatagactgctgcaaccacatcaccaagctgcgtgaacaacacagaagagaccacgtgctgggcctggccaggagtgaattggaggaagacataattccagaagaagatattatctctagaagccacttcccacagagctggttgtggaccatagaagagttgaaagaaccagagaaaaatggaatctctacgaaggtcatgaacatctttctcaaagattccatcaccacctgggagattctggcagtgagcttgtcagacaagaaagggatctgtgtggcagacccctatgagatcagagtgatgcaggacttcttcattgacctgcggctgccctactctgtagtgcgcaacgaacaggtggagatcagagctgtgctcttcaactaccgtgaacagcaggaacttaaggtgagggtggaactgttgcataatccagccttctgcagcatggccaccgccaagaatcgctacttccagaccatcaaaatccctcccaagtcctcggtggctgtaccgtatgtcattgtccccttgaagatcggccaacaagaggtggaggtcaaggctgctgtcttcaatcacttcatcagtgatggtgtcaagaagacactgaaggtcgtgccagaaggaatgagaatcaacaaaactgtggccatccatacactggacccagagaagctcggtcaagggggagtgcagaaggtggatgtgcctgccgcagaccttagcgaccaagtgccagacacagactctgagaccagaattatcctgcaagggagcccggtggttcagatggctgaagatgctgtggacggggagcggctgaaacacctgatcgtgacccccgcaggctgtggggaacagaacatgattggcatgacaccaacagtcattgcggtacactacctggaccagaccgaacagtgggagaagttcggcatagagaagaggcaagaggccctggagctcatcaagaaagggtacacccagcagctggccttcaaacagcccagctctgcctatgctgccttcaacaaccggccccccagcacctggctgacagcctacgtggtcaaggtcttctctctagctgccaacctcatcgccatcgactctcacgtcctgtgtggggctgttaaatggttgattctggagaaacagaagccggatggtgtctttcaggaggatgggcccgtgattcaccaagaaatgattggtggcttccggaacgccaaggaggcagatgtgtcactcacagccttcgtcctcatcgcactgcaggaagccagggacatctgtgaggggcaggtcaatagccttcctgggagcatcaacaaggcaggggagtatattgaagccagttacatgaacctgcagagaccatacacagtggccattgctgggtatgccctggccctgatgaacaaactggaggaaccttacctcggcaagtttctgaacacagccaaagatcggaaccgctgggaggagcctgaccagcagctctacaacgtagaggccacatcctacgccctcctggccctgctgctgctgaaagactttgactctgtgccccctgtagtgcgctggctcaatgagcaaagatactacggaggcggctatggctccacccaggctaccttcatggtattccaagccttggcccaatatcaaacagatgtccctgaccataaggacttgaacatggatgtgtccttccacctccccagccgtagctctgcaaccacgtttcgcctgctctgggaaaatggcaacctcctgcgatcggaagagaccaagcaaaatgaggccttctctctaacagccaaaggaaaaggccgaggcacattgtcggtggtggcagtgtatcatgccaaactcaaaagcaaagtcacctgcaagaagtttgacctcagggtcagcataagaccagcccctgagacagccaagaagcccgaggaagccaagaataccatgttccttgaaatctgcaccaagtacttgggagatgtggacgccactatgtccatcctggacatctccatgatgactggctttgctccagacacaaaggacctggaactgctggcctctggagtagatagatacatctccaagtacgagatgaacaaagccttctccaacaagaacaccctcatcatctacctagaaaagatttcacacaccgaagaagactgcctgaccttcaaagttcaccagtactttaatgtgggacttatccagcccgggtcggtcaaggtctactcctattacaacctcgaggaatcatgcacccggttctatcatccagagaaggacgatgggatgctcagcaagctgtgccacagtgaaatgtgccggtgtgctgaagagaactgcttcatgcaacagtcacaggagaagatcaacctgaatgtccggctagacaaggcttgtgagcccggagtcgactatgtgtacaagaccgagctaaccaacataaagctgttggatgattttgatgagtacaccatgaccatccagcaggtcatcaagtcaggctcagatgaggtgcaggcagggcagcaacgcaagttcatcagccacatcaagtgcagaaacgccctgaagctgcagaaagggaagaagtacctcatgtggggcctctcctctgacctctggggagaaaagcccaacaccagctacatcattgggaaggacacgtgggtggagcactggcctgaggcagaagaatgccaggatcagaagtaccagaaacagtgcgaagaacttggggcattcacagaatctatggtggtttatggttgtcccaactgactacagcccagccctctaataaagcttcagttgtatttc

SEQ ID NO: 190 - DNA, 3306 bp, Mus musculus
gaattcccgcgcggccgccagagctccggcccgggggctgcctgtgtgttcctggcccggcgtggcgactgctctccgggctggcgggggccgggcgtgagcccgggcctcagcgttcctgagcgctgcgagtgttcactactcgccagcaaagtttggagtaggcaacgcaagctccagtcctttcttctgctgctgcccagatccgagagcagctccggtgtatgtctagctgttctgcgatcccggcgcgcgtgaagcctcggaaccttggcgccggctgctacccaaggaatcgttctctttttggagttttcctccgagatcatcgcctgctccatcccgatccactctgggctccggcgcagcaccgagcgcagaggagcgctgccattcaagtggcagccacagcagcagcagcagcagcagtgggagcaggaacagcagtaacaacagcaacagcagcacagccgcctcagagctttgctcctgagcccctgtgggctgaaggcattgcaggtagcccatggtctcagaagaagtgtgcagatgggattaccgtccacgtggagatatggaagaggaccagggattggcactgtgaccatggtcagctgggggcgcttcatctgcctggtcttggtcaccatggcaaccttgtccctggcccggccctccttcagtttagttgaggataccactttagaaccagaagagccaccaaccaaataccaaatctcccaaccagaagcgtacgtggttgcccccggggaatcgctagagttgcagtgcatgttgaaagatgccgccgtgatcagttggactaaggatggggtgcacttggggcccaacaataggacagtgcttattggggagtatctccagataaaaggtgccacacctagagactccggcctctatgcttgtactgcagctaggacggtagacagtgaaacttggatcttcatggtgaatgtcacagatgccatctcatctggagatgatgaggacgacacagatagctccgaagacgttgtcagtgagaacaggagcaaccagagagcaccgtactggaccaacaccgagaagatggagaagcggctccacgcttgtcctgccgccaacactgtgaagttccgctgtccggctggggggaatccaacgtccacaatgaggtggttaaaaaacgggaaggagtttaagcaggagcatcgcattggaggctataaggtacgaaaccagcactggagccttattatggaaagtgtggtcccgtcagacaaaggcaactacacctgcctggtggagaatgaatacgggtccatcaaccacacctaccacctggatgtcgttgaacgttcaccacaccgtcccatcctccaagctggactgcctgcaaatgcctccacggtggtcggaggggatgtggagtttgtctgcaaggtttacagcgatgcccagccccacatccagtggatcaagcacgtggaaaagaacggcagtaaaaacgggcctgatgggctgccctacctcaaggttctgaaagctgccggtgttaacaccacggacaaagagattgaggttctctatattcggaatgtaacttttgaggatgctggggaatatacgtgcttggcgggtaattctatcgggatatcctttcactctgcatggttgacagttctgccagcgcctgtgagagagaaggagatcacggcttccccagattatctggagatagctatttactgcataggggtcttcttaatcgcctgcatggtggtgacagtcatcttttgccgaatgaagaccacgaccaagaagccagacttcagcagccagccagctgtgcacaagctgaccaagcgcatccccctgcggagacaggtaacagtttcggccgagtccagctcctccatgaactccaacaccccgctggtgaggataacaacgcgtctgtcctcaacagcggacaccccgatgctagcaggggtctccgagtatgagttgccagaggatccaaagtgggaattccccagagataagctgacgctgggcaaacccctgggggaaggttgcttcgggcaagtagtcatggctgaagcagtgggaatcgataaagacaaacccaaggaggcggtcaccgtggcagtgaagatgttgaaagatgatgccacagagaaggacctgtctgatctggtatcagagatggagatgatgaagatgattgggaaacataagaacattatcaacctcctgggggcctgcacgcaggatggacctctctacgtcatagttgaatatgcatcgaaaggcaacctccgggaatacctccgagcccggaggccacctggcatggagtactcctatgacattaaccgtgtccccgaggagcagatgaccttcaaggacttggtgtcctgcacctaccagctggctagaggcatggagtacttggcttcccaaaaatgtatccatcgagatttggctgccagaaacgtgttggtaacagaaaacaatgtgatgaagatagcagactttggcctggccagggatatcaacaacatagactactataaaaagaccacaaatgggcgacttccagtcaagtggatggctcctgaagccctttttgatagagtttacactcatcagagcgatgtctggtccttcggggtgttaatgtgggagatctttactttagggggctcaccctacccagggattcccgtggaggaactttttaagctgctcaaagagggacacaggatggacaagcccaccaactgcaccaatgaactgtacatgatgatgagggattgctggcatgctgtaccctcacagagacccacattcaagcagttggtcgaagacttggatcgaattctgactctcacaaccaatgaggaatacttggatctcacccagcctctcgaacagtattctcctagttaccccgacacaagtagctcttgttcttcaggggacgattctgtgttttctccagaccccatgccttatgaaccctgtctgcctcagtatccacacataaacggcagtgttaaaacatgagtgaatgtgtcttcctgtccccaaacaggacagcaccaggaacctacttacactgagcagagaggctgtgctccagagcctgtgacacgcctccacttgtatatatggatcagaggagtaaatagtgggaagcatatttgtcacgtgtgtaaagatttatacagttggaacatgtactacaggaaggagactgttctgatagtgacagccgccaccatgccacctttgaccaca

SEQ ID NO: 191 - DNA, 2626 bp, Mus musculus
gctggctttggttctgcaaagcctcagtctgtaggagaccttcgctgctggagccatgccttctgtcgctttgaaatctccgcgcctgcgccgggtgttcgtggtcggcgttggcatgaccaagttcatgaagcctggaggtgagaactcaagagactatcctgatatggcaaaggaagcaggccagaaggcattggaagatgcacagatcccttactccgcagtggaacaggcatgcgttggctatgtgtatggtgattccaccagtgggcagagggctatctatcatagtttgggactgactggcattcctataattaatgtcaacaataactgttctactggttcgactgctttgtttatggcccatcaactgattcaaggaggcttggcaaattgtgtgttggctcttgggtttgagaagatggagaggggatccattggaacaaaattctcagatcggaccactccaactgataaacatattgaagtcttgatcgataagtatggattgtctgcacatccgattactcctcagatgtttgggtatgctgggaaagaacatatggaaaaatatggaacaaaagttgaacactttgcaaaaattggatggaaaaatcataaacactcagttaataacacgtattcccagttccaagatgaatacagcttagaagaagtaatgaaatcaaaaccagttttcgattttctgactatcttgcaatgctgccccacctcagatggtgccgctgccgcgattctgtccagcgaggagtttgtgcagcagtacggcctgcagtccaaagcggtggagattgtggcccaggagatgatgactgacttacccagtacgtttgaagagaaaagtattattaaagtggttggctatgatatgagtaaagaagctgccaggagatgctatgagaagtccggcctgacacccaacgatgtcgacgtgatagagcttcacgattgcttctctgtcaatgaactcatcacttacgaagcactggggctctgtccagaaggacaaggtggaaccctggtggacagaggggacaacacttacggaggaaagtgggtcatcaaccctagtggaggcctcatctcaaagggacacccactgggcgcaacaggtctggctcagtgcgcggagctctgctggcagctgagaggcgaagccggaaagaggcaggttcccggggcaaaggtggctctgcagcacaatctaggcctcggaggagctgtggttgtcaccctctacaggatgggttttcccgaagctgccagctccttcaggacgcaccaggtttcagctgctcccaccagctctgcaggggatggattcaaggcaaacctcgtctttaaggagattgagaagaagcttgaagaggaaggggaacagttcgtgaagaaaatcggtggcatttttgccttcaaagtgaaagatggccctggaggcaaagaagctacctgggtggtggatgtgaagaatggcaaaggatctgtgcttcccaattcagataagaaggctgactgcacaatcaccatggccgactcagacttgctggctttgatgactggaaaaatgaaccctcagtcggccttctttcaagggaaactgaagattgctggtaacatgggactggccatgaaactacagaaccttcagcttcagccgggcaaagctaagctgtgaggagtccctttggcaacctcaggacatcaagatgagatgtgtagataggtagagatccacgtctcgtcgtcagggcttagactgacacctcccgaatagcatgagatagatttgttgctaattgggtgtggtcaattgtgtttccccgaagctgggaggtacatagggcctccctgcctgcactgctgctttgaggacttgcattctactgtgcttgatgaagctactatgtcaatgatggtttggggtaaacttgagtttcagaataaaattcagaacagtaaaatctgaagactgagtaaacaaagcccttgttttgcttagaagtatatttgaggatcactgtgttggacactcggtgtgacatttctccttggggggactagagaagaaacagatttccatagttgaccaggaattagtgcctcacactcaattacctgcatcagtttctcactaatagttcttaaaataaaattctgtactaaaagtttaaaaaaaaaactttaaaaatgttcattttatgccatcagaaacagttcttttcttcccaaataaaatacaagaattatggtcagagcttaagagagaatttacagctgaacagaactgttttaaaatatttttcaaatgggcatctttttaaaaatcatagtatcagagccatggataccattaataaaaataactgaataaagttttttccagagatacgggcttcaaattatagtttcatattaataagtgtataaactgagtctcacaaatttcctttttcatacacttgattgtctgcatttatctttcttccaagtttttctaattctaatgctatttgttataatttaggtttgggataaaaatatgcttttggaagatttaaaaagaaaattaaaacagctcttcctgataaaaaaaaaaaaaaaa

SEQ ID NO: 192 - DNA, 4301 bp, Mus musculus
gagtttccggggaacttttccttaacgtgggcctagtccgaagccgggtgggcgccggcgccatggacgagctggccttcggtgaggcggctctggaacagacactggccgagatgtgcgaactggacacagcggttttgaacgacatcgaagacatgctccagctcatcaacaaccaagacagtgacttcccgggcctgtttgacgccccctatgctgggggtgagacaggggacacaggccccagcagcccaggtgccaactctcctgagagcttctcttctgcttctctggcctcctctctggaagccttcctgggaggacccaaggtgacacctgcacccttgtcccctccaccatcggcacccgctgctttaaagatgtacccgtccgtttcccccttttcccctgggcctgggatcaaagaggagccagtgccactcaccatcctacagcctgcagcgccacagccgtcaccggggaccctcctgcctccgagcttccccgcaccacccgtacagctcagccctgcgcccgtgctgggttactcgagcctgccttcaggcttctcagggacccttccaggaaacactcagcagccaccatctagcctgccgctggcccctgcaccaggagtcttgcccacccctgccctgcacacccaggtccaaagcttggcctcccagcagccgctgccagcctcagcagcccctagaacaaacactgtgacctcacaggtccagcaggtcccagttgtactgcagccacacttcatcaaggcagactcactgctgctgacagctgtgaagacagatgcaggagccaccgtgaagactgcaggcatcagcaccctggctcctggcacagccgtgcaggcaggtcccctgcagaccctggtgagtggagggaccatcttggccacagtacctttggttgtggacacagacaaactgcccatccaccgactcgcagctggcagcaaggccctaggctcagctcagagccgtggtgagaagcgcacagcccacaatgccattgagaagcgctaccggtcttctatcaatgacaagattgtggagctcaaagacctggtggtgggcactgaagcaaagctgaataaatctgctgtcttgcgcaaggccatcgactacatccgcttcttgcagcacagcaaccagaagctcaagcaggagaacctgaccctacgaagtgcacacaaaagcaaatcactgaaggacctggtgtcagcttgtggcagtggaggaggcacagatgtgtctatggagggcatgaaacccgaagtggtggagacgcttacccctccaccctcagacgccggctcaccctcccagagtagccccttgtcttttggcagcagagctagcagcagtggtggtagtgactctgagcccgacagtccagcctttgaggatagccaggtcaaagcccagcggctgccttcacacagccgaggcatgctggaccgctcccgcctggccctgtgtgtactggcctttctgtgtctgacctgcaatcctttggcctcgcttttcggctggggcattctcactccctctgatgctacgggtacacaccgtagttctgggcgcagcatgctggaggcagagagcagagatggctctaattggacccagtggttgctgccacccctagtctggctggccaatggactactagtgttggcctgcttggctcttctctttgtctatggggaacctgtgactaggccacactctggcccggctgtacacttctggagacatcgcaaacaagctgacctggatttggcccggggagatttcccccaggctgctcaacagctgtggctggccctgcaagcgctgggccggcccctgcccacctcaaacctggatctggcctgcagtctgctttggaacctcatccgccacctgctccagcgtctctgggtgggccgctggctggcaggccaggccgggggcctgctgagggaccgtgggctgaggaaggatgcccgtgccagtgcccgggatgcggctgttgtctaccataagctgcaccagctgcatgccatgggcaagtacacaggaggacatcttgctgcttctaacctggcactaagtgccctcaacctggctgagtgcgcaggagatgctatctccatggcaacactggcagagatctatgtggcagcggccctgagggtcaaaaccagcctcccaagagccctgcacttcttgacacgtttcttcctgagcagcgcccgccaggcctgcctagcacagagcggctcggtgcctcttgccatgcagtggctctgccaccctgtaggtcaccgtttctttgtggacggggactgggccgtgcacggtgcccccccggagagcctgtacagcgtggctgggaacccagtggatccgctggcccaggtgacccggctattccgtgaacatctcctagagcgagcgttgaactgtattgctcagcccagcccaggggcagctgacggagacagggagttctcagatgcccttggatatctgcagttgctaaatagctgttctgatgctgccggggctcctgcttgcagtttctctgtcagctccagcatggctgccaccactggcccagacccagtggccaagtggtgggcctcactgacagctgtggtgatccactggctgaggcgggatgaagaggcagctgagcgcttgtacccactggtagagcatatcccccaggtgctgcaggacactgagagacccctgcccagggcagctctgtactccttcaaggctgcccgggctctgctggaccacagaaaggtggaatctagcccagccagcctggccatctgtgagaaggccagtgggtacctgcgggacagcttagcctctacaccaactggcagttccattgacaaggccatgcagctgctcctgtgtgatctacttcttgtggcccgtaccagtctgtggcagcggcagcagtcaccagcttcagtccaggtagctcacggtaccagcaatggaccccaggcctctgctctggagctgcgtggtttccaacatgacctgagcagcctgcggcggttggcacagagcttccggcctgctatgaggagggtattcctacatgaggccacagctcggctgatggcaggagcaagtcctgcccggacacaccagctcctggatcgcagtctgaggaggagggcaggttccagtggcaaaggaggcactacagctgagctggagccacggcccacatggcgggagcacaccgaggccctgctgttggcatcctgctatctgccccctgccttcctgtcggctcctgggcagcgaatgagcatgctggccgaggcggcacgcaccgtagagaagcttggcgatcaccggctactgctggactgccagcagatgctcctgcgcctgggcggcggaaccaccgtcacttccagctagaccccaaagctttcccttgaggacctttgtcattggctgtggtcttccagagggtgagcctgacaagcaatcaggaccatgccgacctctagtggcagatctggaaattgcagaggctgcactggcccgatggcaccctcttgctctgtaggcaccttagtggcttttccctagctgaggctcaccctgggagacctgtacatagtgtagatccggctgggcctggctccagggcaggcccatgtactactttgacttttgcaaactttattttcataggttgagaaattttgtacagaatattaaaaaatgaaattatttataacttcagttttgtttatctgggtaggcagatgtctgcctcagctgattgctatctttcctggcttgtcctttgggaagccggacttcccatctgttgtaaggtgtatttgctggcttggtgatgctatgttgagccaccttggccctctgatctcatggctcataacccttgaggggccttgatggtctcagttgttcctttgccttccagccctccaccaggtaataaccccgtatatccagaaacacacacagttccctagtcatctctgtgcaccagcataggcgaaggatcagggcccattagtgagtagactgggaaccctgtttgtgtcccccggccccttccctctactcccaaccccttagggaatctggtcggcatccacaggccgcacacttccaaaacaatcgtggtatctttattgacttttttttttctgaatgcaatgactgtttttttttttttttaactcttaaggaaaataaacatcttttagaaacagctcg

SEQ ID NO: 193 - DNA, 4256 bp, Mus musculus
gattccgccgccgccgtctgcagactcggtcaccactcaagatggcagaggctcaccaagctgtggccttccagttcacagtcacccctgatggcatcgatctccgcctgagccatgaagccctcaaacagatctgcctgtcagggctgcactcctggaagaagaagttcatccgattcaagaatggcatcatcactggtgtgttccccgcgagtccctccagctggcttatcgtggtggtgggtgtgatatcatccatgcataccaaagtggacccctccctgggcatgattgcaaagatcaatcggaccctagacaccactggccgcatgtcaagccagacgaagaacatcgtgagtggcgtcctctttggcacagggctctgggtggcgatcatcatgactatgcgctactcgctgaaggtgctgctctcctaccatggctggatgtttgcagagcacggcaaaatgagccgcagcaccagaatctggatggctatggtcaaggtcttctcgggtcgaaagcccatgttgtacagcttccagacgtctctgccgcgcctgcctgtcccagctgtcaaagataccgtgagcaggtacctggagtctgtgaggccactgatgaaggagggagacttccaacgcatgacagcactggcccaggattttgctgtcaaccttggacccaaattgcagtggtatttgaagctaaaatcctggtgggccacaaattatgtgagtgactggtgggaggaatacatctacctgcggggccgagggccgatcatggttaacagcaactactacgccatggagatgctctacatcaccccaacccatattcaggcagcgagagctggcaacaccatccacgccatactgctgtatcgtcgcacggtagaccgtgaggaactcaaacctattcgtcttctgggatctacaattcccctctgctctgctcagtgggagcgactcttcaatacttcccgcatccctggggaggagacagacaccatccaacacgtcaaggacagcaggcacattgtcgtgtaccacagaggccgttacttcaaggtctggctctaccatgacgggaggctgctgaggccccgtgagctggagcagcagatgcagcagatcctggatgacacctcagagccgcagcccggggaagccaagcttgccgccctcactgccgcagacagagtgccctgggcgaagtgtcggcagacctattttgcacgaggaaaaaataagcaatctctggatgcggtagaaaaggcagcattcttcgtgacgttggacgaatcggaacagggatatagagaggaggaccctgaggcatctattgacagctatgccaaatctctgctgcatggtagatgtttcgacaggtggtttgacaagtccatcacctttgttgtcttcaaaaacagcaagataggcataaacgcagagcattcctgggcggacgcgcccatcgtgggccatctgtgggagtatgtcatggccaccgacgtcttccagctgggctactcagaggatggacactgtaaaggagacaagaaccccaacatccccaaacccaccaggctacagtgggacattccaggagaatgccaggaggtcatagacacatccctaagcagtgccagttttttggcaaatgatgtggacctgcattccttcccatttgacacctttggcaaaggcttgatcaagaagtgccggacgagtcccgatgccttcatccagctggcactgcagctcgcacattacaaggacatgggcaagttctgcctcacgtatgaggcttccatgactcggctcttccgagaggggaggacagagactgtacgctcctgcactacggagtcctgcaactttgtgctggccatgatggaccccacaacaacggcagagcagaggttcaagctgttcaagatagcttgtgaaaagcaccagcacctgtaccgcctcgccatgacgggcgctggcatcgaccgccacctcttctgcctctatgtggtgtccaagtatctggcagtcgactcacctttcctgaaggaggtactgtctgagccatggaggttgtccacgagccagactcctcagcagcaggtggaactgtttgactttgagaaataccctgactatgtgtcctgtggcgggggctttgggccggttgctgatgacggctatggtgtttcctacattattgtgggagagaatttcatccacttccatatttcttccaagttctctagccctgagacagactcacaccgctttgggaagcacttgagacaagccatgatggacattatcaccttgtttggcctcaccgccaattccaaaaagtaactgtcggagccgcacggaaggaaaatggactctagtgatacaaaccaaatgaataggtgttgctcctgaccataggacaggcagaaaattgttcttataaaactcagttttccttccagaaggtttaccgtcggtctccctagaacaaccgtaggctccaccgtttgacttgtgaccctactacatccagagatgccttggctccaggaatattgggcacagtcccccgaagtcttttgaatcggctcctaatggataaagggatttaaatgctggtgaatccctggattttgggggttgtatcaatatgtgttggaggtgacagacttcctcagtggtgaccctgtggatacttgggacttgacttcacccaggcagtgagagcatcaccttgtggaaagagaaagtggcttcagagccagtggaggtaacagctctagctaacacacctgtaacacactaatggaatggttaggccaggggattaaggttctgctatgaatgacagccaccatcgctttgggagtccacatttgactccacatttcctggaagcaggataccacctcctcagtgccaccttcgaaacccagtgccttaacgatgggagcccattggcaagtggggccatagagaaggcttagcatgtgaagcctttgggtggatatgtgagggtgctgcttcccctcacaagttcctgcatagagatgtccctaagtaagcacttcccccaccctagaagatgaggtccctggtggagggagcgatgcagaatctcattggccaccagttccattaagcaacaaaataacagatgtgtccacagagggaagtgaggggcttggtagtcaaaggctaccaagttggacaccagctggagagtgtggcagccattggcaaggagagtgagaccctggtcactgagtcaggcatactgacacaggcagccaaagccttgtcatggcagccaggagatagagatcctggcagatacaccaacgggctcatcttctaatcccacccagtcagattccaaccagagcaaattcgatagaaggctaggtcattttggtgacagactcgggggtctcaagtaatgggtgctttgtacccaaataccatccctctgtgagaggtgcctttcttgacaacatccaatagactgtaaagcaactcggtttggtattccatgtaaacatagcataatggagtggcctcccctacctgttaccatcctgtcctgacaaggtttagctcttcgtgttttaaatcatgtatttattttccagtgcccctttggccttgcttgattcctactcgtgtgctagctgtaacagaagtgagggtggggtggccagaagtacggagaggtgctggctgaacagctcatgcgtgttttgtaagtatccatgaatacaaaaaaaagaatcacacctacaagggccaaagtttttttcctactaaaaacaagaaaacaaaaggcaacataaatatatagcagagacaactgtaagtcaaagccgcctgaccgcgctcttaggactacttgctaacctctgttactcggagtattcctgctagtacccaagtgtgacattcctctctcaggtctccagtgtccttccttgctgctcctgagcagttaccaatgcaattttttactccttccaaggcagaagagtgggctttcactgtaagtgttcaaaggaggaggtaagactactatgtatttaatgtggaacaaaacatagtcttaccgcagccaaggttcgaatttggttttctaatctgtccattgcatgtaaataccatatgctgtttggatataaatcttagaaatgcatgtgtgaacgaatatagctgaccattaataaaacattaatcccgcctact

SEQ ID NO: 194 - DNA, 3494 bp, Mus musculus
gagatcagcctgaaagccaaaatgggactccaagcccgcctcctagggctccttgctctcgtcatcgccggcaaatgcacttacaaccctgagccggaccagcggtggatgctgcctccaggctgggtgtccctgggccgcgtggatcccgaggaagagctgagtctcacttttgcgctgaaacagcggaacctggaaagactctcggagctggtgcaggctgtgtcggatcctagctctcctcaatatggaaagtacctaaccctggaggatgtagctgagctggttcaaccatcacccctgaccctcctcactgtccaaaagtggctctcagcagctggagcccggaactgcgattcagtgaccacccaggactttctgacttgctggctgagtgtccgacaggctgagctgctgctcccaggagctgagtttcatcgctatgtagggggacctacaaagacccatgttataaggtccccacatccctaccagcttccccaggccttggcccctcatgtggattttgtgggggggctgcaccgtttccccccttcatctccaagacaacgtccagaaccacaacaggtaggaactgttagcctgcacttgggagtgactccgtctgtgctccgtcagcgatacaacctgacagccaaagatgtgggctcaggcaccaccaacaatagccaggcctgtgcccagttcctggaacagtacttccataactcggatctgactgagttcatgcgcctattcggtggcagttttacacaccaggcctcagtagcaaaagttgttggaaagcaagggcgaggccgagctgggatcgaggccagtctagatgtggaatacctgatgagtgctggtgccaatatctccacttgggtctacagtagccctggccgccatgaggcacaggagcccttcttacaatggctcctgcttcttagcaatgagtcatctttgccacatgtacatactgtgagttacggagacgatgaagactccctcagcagcatctacatccagagagtcaacactgagttcatgaaggctgctgctcggggtctcaccctcctttttgcctcaggtgacactggagctgggtgttggtctgtctccggaagacacaagttccgccctagcttccctgcttccagcccctatgttactacagttggaggaacctccttcaagaatcctttcctcatcacagatgaagtagttgactatatcagtggtggaggcttcagcaatgttttcccacggcctccctaccaggaggaagcagtggcccagttcttgaaatccagctctcatctaccaccatccagttacttcaatgctagtggccgtgcctacccagatgttgccgcactatctgatggctactgggtggtcagcaacatggtccccattccatgggtatctggaacctcggcctctactccagtgtttgggggaattttatccttgataaatgagcacagaatcctcaatggccgccctcctcttggctttctcaaccccaggctctatcagcagcatgggacaggactctttgatgtaacccacggctgccatgagtcctgtctgaatgaagaagtggagggtcagggtttctgctctggtcctggctgggatcctgtgacaggttggggaacacccaacttcccagccctattgaagaccctgctcaacccttgaccctttcgtgccatgacgagaaagcagaactgttccctgtactaaaagggaaggctcagtttcttgttattcctcgatagaagccctgctgaactcctgttgcctgctgcagatagcttctccctaaccctcagatgctgtgaacaggactcaactctcaatcctactgtgtgccatcaaactcaggtctccaaacttctacttcaagatcctcaacaagatgctataaccagcatattttgtctcaccccaaccccatctctccttcctctttccagcttgagatgtgaaagcagggcaagaaggttcagtcttccattactggcactagcaggtccacccaacgcttaccacctctgcactgaccgtacactctatttctcttcgggtttgcttttccgttcactgaagtgagacctttgactaatcgttttgtctttcttctctcggcactgaagtacaatggtctccccaatgttttatccagttatacccttttcagtgtttgttttatgggttttcttatttaagaacaggttgtcaaaaaaccattaaaaaaaaaaagaaaaagaacacattggctgcaatctatttaactatataactattctaaggaaagttaaaaattgaaaacttaaaatgtttgaaatgttctcattggcaaaattcctcaacaaaataaataggtcattacaaattttgctttaaatttttgcttgagtgatttttttttttgtaaagtgttttaaaatttacattttattttccccttctcagctacaccaaagcaacattcaggttttaatttcaactgtcagacattacaaacatctagcttctgtgaacctgggtgtttgttctttccatcagtttcccatttatcctttttcctcagtgacccccctctgaccacactaatcagcccccttttctgctgactccagggatgctgtgttcattgttccattcttagtttcttgctcttatcattttattatcatcccttgacagatcactgacatctatacccacagtgagtgatacctcaaatgtgagatacctcgttacttcatctccctccagcccagacctaaactatttcatctcttaatctatgatataatgcctctttcaaacaagccagaaacctataactcttaactctcatctttttcacctccttactaacttcaaaaagttttcttgactgcctctcaagtatatctttatcggctagtgtggtgatgcacacctttaatcccagcactcaggagacagaggccaggcaagtctctgagtttgaggccatcctggtctatataaagagttccagacaagccaggcctacatagtcagaccatgtctcaaaaatacacatatgtgcacacacacacatgcacaaaatactgcattatctttgagcccatgttcttttttcttctaaactgcaggaagcacttggggagaggaaaggcttccgaagcccctcatcttccaaaccaagcagtctatgtatttgtgcaaacccttcaaagattactgggtaaaagtcagagacattgaaacttgccttcaaaatcgggaaataaacattgctaatgtctcacacttggaattaagcaatgaatgttagtttccctttcttctttgcactgcacctacatgtagctgggaaacaatcatacagtattgaaattgtcagtttgtttgccttccttttccagacagtcggtgctagtgaactagaatctgattcttaactttgtattcctaggtcccagccc

SEQ ID NO: 195 - DNA, 3624 bp, Mus musculus
aggcagcggaggagccgagccgggctgcgctcgctcgccgccccccagcctctttcttctccgccgggtgcactgccctgcgccgtcccctcgccgctgcgccccttgacaaagaggacagaaagtttgcgcgggggagcgggccaggtgaggaggggcgtgcccggcgccccagtccgcgccccagcagccggacccaggcccccagcgcgcccgccatgggcgccgcggcccgcagcctccggctggcgctcggcctcctgctgctagccacgctgctgcgcccggccgacgcctgcagctgctccccggtgcacccgcaacaggcgttttgcaatgcagacgtagtgatcagagccaaagcagtgagcgagaaggaggtggattccgggaatgacatctatggcaaccccatcaagaggattcagtatgagatcaagcagataaagatgttcaaaggacctgacaaagacatcgagtttatctacacggccccctcttcagcagtgtgcggggtctcgctggacgttggaggaaagaaggagtatctaattgcaggaaaggcagaaggagatggcaagatgcacattaccctctgtgacttcattgtgccctgggacacgcttagcatcacccagaagaagagcctgaaccacaggtaccagatgggctgtgagtgcaagatcactcgctgtcccatgatcccttgctacatctcctccccggatgagtgcctctggatggactgggtcacagagaagagcatcaatgggcaccaggccaagttcttcgcctgcatcaagagaagtgatggttcttgcgcgtggtaccgcggggcggcaccccccaagcaagagtttcttgacatcgaggacccgtaagaaggctgacagagcccctgtggccaattgaaaagcctctgagggtttagactggtccagctttgacatcccttcctggaaacagcatgaataaaacatcaatcatccaagtgggttcacgctagtgtgattctgccccctcccctattttccctagacatggtagtgggtctggagggacaggcgggccaggttccctgccataccccttccctctgccagcctgagcactgtgtgtctcagtctttgatccttgctacaggcaggagtggagcacagacttgttaccaggtctctctggcactgtcacatgcagcagacaggcagcattaagggtaccctagctctgttagggcagagcctgggaatgtgcattttgcagaaactcttgaaggttgttgtaagactgtgtagccggcctaccaggtccttttcatcctgagagtgacatgtccctcgttttctgcagtggccacctctctctctggcccttgcaaatgcttcccatccctcctgcatctggtatggactttcaggaccctggtctccctcgggtctaagaatcaccctccaaccagtggttcatttttctaggagtcccagtcagccccatgaatccacagacttcagcgaatggaagccctccctgagccgtgtttctggcttcaaccaagtcattgctgccttcctctcccctgtctctacacacaccctcagtggggtctgtgaggtctcatgctgggggcagggatctgtggtgaggggtgcttggcagtccttgttgccactctcaagcttcccaagccattcttcacccctttccaagcaagcttcaagcatccaggctgagcagcacggctcggtttggctctctgtcgcatcaggccctgccgctgttggggggcgctaccagcactccctcttttgcacaaactgatgatataaaaggccagtcctaggcacctaggaaaagtctagtgaactctccctgctagatcagcggtcattatgaccctgttgatttctgtgtcagtaactaagcacgcagcaggggagactttgcggtgggcagttcttcgtaccaagcccccccccccaaggatgctgtggcttgttttcagatccatctcattttcctaaaggtgaattctcatgcatggctgagagacatgtgtatgcagctctgcttctgtctcttaatgtcgcttaaggcccttatagggaactggtatatctacttgctccttaaagcaattttctttctgatgccaataggatgggggttaagacaggcagagctttatcactaacaatatagacagccactcttccttctgcctgcgtcttaaaaaataagctgtcccaaggacacaaatgtatattatccatacatgcacgcatatgctcacacacaaactcagactctgaagtctggtagcctgtgaatgttccttttgtaaaatgcttccaaaagcctctttgctccaaccctgtcctaaccatcagaaaccccaaagaaacggttaaggactccccctcagactctccctacccaagcccctacaccaggacctggccagtccttttaagacagactgggaggacacacaggagtcagcctgcccctcagactctccctacccaagcccctacaccaggacctggccagtccttttaagacagactgggaggacacacaggagtcagcctgccccttctgagggcattttcgtgttgtgcagtgatgttcttccttggatgctggcctggaccagccaacgagaccctgcagtctatcccgccctgcctgtttgcttcctgtgcggtggtatcaatatgtaacagtgcctgtttctgctgatttcatgacatgttctggtttgtttctgatgttcgccgtgagcgttcttgtgccgtgttgatgcctttcgtagcattagactttgcacttttaaaaaaaaaaaaaacaaaaatgttgaagcatcgaggaagcatcgaacccagagtggaatgcatggtatggtagctggcctgggacagagggaccctttctcatcttcctttgagttctttgactatcttcttttccagcctctcccgtcttttgtatctggttcaaattattataaaggaaagaccctctgagtataccggttctgaaagacggcctttctgttttccactcatgctggggtttctagccacaccaggcagatgagaggaaaccgagcgagcaaacgaacctttgggacaaagtgccagatggcagctgagcaacagccactcaaatgccttcccagcaaaccaattgcaatatatagtttaaggtgttgttttacttctgttatattctaagccctgggcctccctcccttactcccgtcatgccagcaactcgcaatatttcagatgacgtttacatggtagcaatttccaaatcgctgcctgatgcgtattaagacatatccgtgggcttgctgcataactcaacgctttgttgattttgtttctgtttgaactcttggttgtagggggggaggggtggaaccccatgtgcgtgctggaatatgaagtctgagatgtaccccccaacaccccacgctggcgatacgtgagagttgttgaaagtcagcaagccgagcgcgcctgatgctctgtatcagtctctacttttatttttatgagtttgctctgtcaatggacaataaaccatattatcaaagaaaaaaaaaaaaaaaaaaaa

SEQ ID NO: 196 - DNA, 2986 bp, Mus musculus
ggggagagtcagaaaggcgaggggcgccgggagcaggcgtgtgggactcctgaccggagagccggaggctgcgccttccccgcaccgggaccttcacgacacaccagatcctagtccttgccccgtgcgaacgcccacgatgaccaccaccctcgtgtccgccaccatttttgacttgagcgaagttttatgcaagggtaacaagatgctcaactacagcactcccagcgctgggggctgcctgctggacaggaaggcagtgggcacccctgctggcgggggcttccctcgcaggcactcggtcactctgcccagctccaagttccatcagaaccagcttctcagcagccttaagggtgagccggccccgtccctgagctcacgcgacagccgctttcgagaccgctctttctccgaagggggcgagcggctgctgcccacccagaagcagcctgggagcggccaggtcaactccagccgctacaagacggagctgtgccgtcccttcgaagaaaacggtgcctgtaagtacggggacaagtgccagttcgcgcatggcatccacgagctccgcagcctgacccgccaccccaagtacaagacggagctgtgccgcaccttccacaccatcggcttttgcccgtacgggccccgctgccacttcattcataacgccgaggagcgacgcgccctggcggggggccgagacctctccgctgaccgtccccgcctccagcatagctttagctttgctgggtttcccagtgccgctgccaccgccgctgccacggggctgctggacagccccacatccatcaccccaccccctatcctgagcgccgatgacctcttgggctcacctactctgcccgatggcaccaataaccccttcgccttttccagccaggagctggcgagcctctttgctcctagcatggggctgcctgggggaggctcccccaccactttcctcttccggcccatgtccgaatcccctcacatgtttgactctccccccagccctcaggattctctctcggaccacgagggctatctgagcagctccagctccagccacagtggctcagactcccctaccttggacaactcaagacgcctgcccattttcagcagactctccatctcagatgactaagccagggtagggagggaccccccccatgcctccttcacctctccaccccatctcttcccttcacctccccaccccctaactttccctcaaaccccacattgatacatttaagctcagcccctttcccagaacaaccttggtatgttaccctccccccacataaggacaagtcaatttgttggtagcttctggcttgaaaccctctccctccatttcatagcccacttaaccacgcataacagagttccatcttttgtcagtagatgcctttttttacccccccccaccccccccggcttaagcccttaagtgccaaatcacaaaagaaaaaaagcagtaaccgtttacagaagcaacttagtgccttgtaatctaactttgtcactgtgactacattacctcttcaacgccagggggcacccgtggggcctcccagagcctctgcccgtggggttgggggtgggggtggggtgacccgcaaccagcagctcccccagctggccacacaagtgcacctttctttcggtctcccgcacactcttcctcttccttatagttactcacctccctcagagagttgttgctggacttggggtttttttggggggaggggtctattttgactttcaaaaccttttacttcccagcccgaacccctgttgactaatcttgcctgggtttgtgtaggtctccagggacaaaggttgaacaagttggacgaaggttttgacataagtgggacttcgtgatttaatttctttctttcttttcttttttttttaagtggggaggaaggggaaactagatggactatgagagacttgattttggtgctaaagttccccaattcatatgtgacatcttaaaaatgacaacaaatgagagaaaagctaaaaacaacaaaaaaaaacatgtaaggggtgagcagttaatggtctgcattccacatacaatatctgtgtaaaacgatttcctgtagaagtagctttaatggattttgctctacaataccttaggtctaccttagagcccccacacaatgcttttttccctgggtttaaacttcatctaactttcagaaattggagagcaaaaatgttgcttatcactgcacatcaatataaaaaagcttatttaacttatcaaaacgtatttattgccaaactatgctttttttgttaattttgttcatatttatcgggatgacaaatccatagaatatattcttttatgttaaattatgatcttcatattaatcttaaaattttgtgacgtgtctttccttttttccacagttttaatatattattcttcaacaacatttttgtaactttacactttttttggttattttattttaaaaaaatgaaaaattaatttaaaaaaatgcaaaaaactgttggattatttattttagaaattctcccctttgtgttggactgcaaattgagtttctttctccttaggcctttcacaggtaggactgagaatgtatgtataagttctgtgacagtacagaaggaaaaccaccattttatgtatagcttctaaaagggaaaacaaaaaaagagaaaaaccctttgaattccatgtgcccatctcaagacattccgctcgcagatttgtggttctggattccaggttggagttttccaatgttgacataaacaactggcgcacacacataaagatgaatgtaattattattcctcttgctggtcactaccgtcgctttctatttctctttctttgtgtgaatttatttaaaagaaaaaaaaaactttttgtaacgactatttgcagtttaaaaatcaataaaccccgtttttc

SEQ ID NO: 197 - DNA, 2145 bp, Mus musculus
gagatgcctcccagggagcccggaccccgacgcaggcagaccatgtgggtcctgatgagctggctggccttcgcggcagggctggtagccggaacacagtgtccagatgggcagttctgccctgttgcctgctgccttgaccagggaggagccaactacagctgctgtaaccctcttctggacacatggcctagaataacgagccatcatctagatggctcctgccagacccatggccactgtcctgctggctattcttgtcttctcactgtgtctgggacttccagctgctgcccgttctctaagggtgtgtcttgtggtgatggctaccactgctgcccccagggcttccactgtagtgcagatgggaaatcctgcttccagatgtcagataaccccttgggtgctgtccagtgtcctgggagccagtttgaatgtcctgactctgccacctgctgcattatggttgatggttcgtggggatgttgtcccatgccccaggcctcttgctgtgaagacagagtgcattgctgtccccatggggcctcctgtgacctggttcacacacgatgcgtttcacccacgggcacccacaccctactaaagaagttccctgcacaaaagaccaacagggcagtgtctttgcctttttctgtcgtgtgccctgatgctaagacccagtgtcccgatgattctacctgctgtgagctacccactgggaagtatggctgctgtccaatgcccaatgccatctgctgttccgaccacctgcactgctgcccccaggacactgtatgtgacctgatccagagtaagtgcctatccaagaactacaccacggatctcctgaccaagctgcctggatacccagtgaaggaggtgaagtgcgacatggaggtgagctgccctgaaggatatacctgctgccgcctcaacactggggcctggggctgctgtccatttgccaaggccgtgtgttgtgaggatcacattcattgctgcccggcagggtttcagtgtcacacagagaaaggaacctgcgaaatgggtatcctccaagtaccctggatgaagaaggtcatagcccccctccgcctgccagacccacagatcttgaagagtgatacaccttgtgatgacttcactaggtgtcctacaaacaatacctgctgcaaactcaattctggggactggggctgctgtcccatcccagaggctgtctgctgctcagacaaccagcattgctgccctcagggcttcacatgtctggctcaggggtactgtcagaagggagacacaatggtggctggcctggagaagatacctgcccgccagacaaccccgctccaaattggagatatcggttgtgaccagcataccagctgcccagtagggcaaacctgctgcccaagcctcaagggaagttgggcctgctgccagctgccccatgctgtgtgctgtgaggaccggcagcactgttgcccggccgggtacacctgcaatgtgaaggcgaggacctgtgagaaggatgtcgattttatccagcctcccgtgctcctgaccctcggccctaaggttgggaatgtggagtgtggagaagggcatttctgccatgataaccagacctgttgtaaagacagtgcaggagtctgggcctgctgtccctacctaaagggtgtctgctgtagagatggacgtcactgttgccccggtggcttccactgttcagccaggggaaccaagtgtttgcgaaagaagattcctcgctgggacatgtttttgagggatccggtcccaagaccgctactgtaaggaagggctacagacttaaggaactccacagtcctgggaaccctgttccgagggtacccactactcaggcctccctagcgcctcctcccctaacgtctccccggcctactcatcctgagtcaccctatcaccatgggaggtggagcctcaaactaaaaccttcttttatggaaagaaggctgtggccaaaagccccgtatcaaactgccatttcttccggtttctgtggaccttgtggccaggtgctcttcccgagccacaggtgttctgtgagcttgcttgtgtgtgtgtgcgcgtgtgcgtgtgttgctccaataaagtttgtacactttc

SEQ ID NO: 198 - DNA, 862 bp, Mus musculus
gattttcagtggctgctactcggcgcttcagtcgcggtcgcttcagtcgtcagcatggctcgctcggtgaccctggtctttctggtgcttgtctcactgaccggcctgtatgctatccagaaaacccctcaaattcaagtatactcacgccacccaccggagaatgggaagccgaacatactgaactgctacgtaacacagttccacccgcctcacattgaaatccaaatgctgaagaacgggaaaaaaattcctaaagtagagatgtcagatatgtccttcagcaaggactggtctttctatatcctggctcacactgaattcacccccactgagactgatacatacgcctgcagagttaagcatgccagtatggccgagcccaagaccgtctactgggatcgagacatgtgatcaagcatcatgatgctctgaagattcatttgaacctgcttaattacaaatccagtttctaatatgctatacaatttatgcacgcagaaagaaatagcaatgtacacatcaccttctttatatcttactttaaatattttatgcatgttttcaaaaaattggaaatatcctagatagctgagcaataaatcttcaataagtattttgatcagaataataaatataattttaagaacaatagttgatcatatgccaaaccctctgtacttctcattacttggatgcagttactcatctttggtctatcacaacataagtgacatactttccttttggtaaagcaaagaggcctaattgaagtctgtcactgtgcccaatgcttagcaattctcacccccaaccctgtggctacttctgcttttgttacttttactaaaaataaaaaacc

SEQ ID NO: 199 - DNA, 1648 bp, Mus musculus
  modified_base (1550)..(1550): a, c, g, t, unknown, or other
  modified_base (1572)..(1572): a, c, g, t, unknown, or other
  modified_base (1621)..(1621): a, c, g, t, unknown, or other
  modified_base (1626)..(1626): a, c, g, t, unknown, or other
gaattcgggagctgccgcaaccacagttccgggatgcaggccctggtgctactcctctggactggagccctgctcgggcacggcagcagccagaacgtccccagcagctctgagggctccccagtcccggacagcacgggcgagcccgtggaggaggaggaccccttcttcaaggtccctgtgaacaagctggcagcagctgtctccaacttcggctacgatctgtaccgcctgagatccggtgccagcccaacgggcaacgtcctgctgtctccactcagcgtggccacggccctctctgccctttctctgggagctgaacatcgaacagagtctgtcattcaccgggctctctactacgacctgatcaccaaccctgacatccacagcacctacaaggagctccttgcctctgttactgcccctgagaagaacctcaagcgtgcttccagaattgtgtttgagaggaaacttcgagtcaaatccagctttgttgcccctctggagaagtcctatgggaccaggccccggatcctcacgggcaaccctcgagtagaccttcaggagattaacaactgggtgcaggcccagatgaaagggaagattgcccggtccacgagggaaatgcccagtgccctcagcatccttctccttggcgtggcttacttcaaggggcagtgggtaaccaagtttgactcgagaaagacgaccctccaggattttcatttggacgaggacaggaccgtgagagtccccatgatgtcagatcctaaggccatcttacgatacggcttggactctgatctcaactgcaagattgcccagctgcccttgacaggaagtatgagcatcatcttcttcctgcccctgaccgtgacccagaacttgaccatgatagaagagagcctcacctctgagttcattcatgacatcgaccgagaactgaagactatccaagctgtgctgactgtccccaagctgaagctgagcttcgaaggcgaacttaccaagtctctgcaggacatgaagctacagtcgttgtttgaatcacccgacttcagcaagattactggcaaacccgtgaagctcacccaagtggaacacagggctgctttcgagtggaatgaagagggggcaggaagcagccccagcccaggcctcttgcccgtccgcctcaccttcccgctagactatcaccttaaccaacctttcctctttgttctgagggacacggacacgggggccctcctcttcataggcagaatcctggaccccagtagcacttaatgtctcagtgctctacagaacccccagagggaagctgattatacattccaggaaggcggccggtagcttcagtgtagcctctgcaataaaagagcttttcttaatgtttgcttcttccttctcctgtttgaagctgtttcatatggagagaaactggtccttatgaatttacatacttgtaacatgaacgggctctgcttaagctctgccaaagtcaccatttcctggtctcggagtgcaggtggatgaggaagaggaacgtnctgccccaggagggcccccgtncccggagggcaccttcacacacaattactaacactgctgtggggtcctnactgnctcttactactacaaatatctg

SEQ ID NO: 200 - DNA, 1965 bp, Mus musculus
cggacgcgtgggcgacccacgcgtccggtttgctactagggcaggttggtgattctccagggcagccatggcagagccacagccggcgtccagtggcctcactgatgagaccgctttcagctgctgctccgatccagaccccagcaccaaggattttctactgcagcaaacgatgctaagaattaaggatcctaagaagtccctggatttttatacgagggttcttggactgaccctcctgcagaagcttgacttccctgctatgaagttctcgctctacttcttagcttacgaggataagaacgatatccccaaggacaagtccgagaagacagcatggatgttttccagaaaagccacccttgagctcacgcacaactggggcactgaagatgacgagactcagagttaccacaacggcaactcggaccctcgtggatttggtcacattgggattgccgttcctgatgtctacagtgcctgtaagagatttgaagaactaggtgtcaagtttgtgaagaagcctgatgacgggaaaatgaaaggactggcgttcattcaagaccctgacggctactggattgagattctgaatcctaacaaaatagcaacgattatttagtttcgggagaatgtgcctttgaggtgtgggggacagcgggaacaaagcggcgtggaaaagaaacagcgtgattcaaggatgctgcggcgaccagaagcgttggggactgatgggtctctctgctccagttcaaatcctcctgaaacccttttcattgtcctgattcagtgggtttttaaaaatctcccctctgttttgccaacctaattttcaagtagcaatttatcttatgaccttgacaaagttgtgtgactttacatttaagataataattagaacagctccctttagagatcacagttgctactgcctgtctcttaaagactgctcaagtctgtttctgattcatcatttagaattttgtttcaaatgtttctttttggggtctgttaccttctggggtttcagttcctcagaaataactttccataatgggaagtacagagcagtgaacagaaatgagattttttttgtgtacttcaaacagcatagtgtttatcttacaaaagagaaggtactcctgagagcaattcggaatcatgctgacaaggacacagatagaaatactaattttctttttttcttttttctttttctttttgtatgtataaagtactttcagaattcaaggactaactttacttttctgggaatgcggaggaggaagggattagacagtgggccatgctgtagcatcctttatgtaaataatgagtactgtggttaccgcgtgagacagcaagcagctagacagacaaagccacctgattggtctgaaggcttgggcggtcagtgtttctagtagctgggttatgcctatgcctcatggtacctcctgccctactgaggaacctgccgggagtctggcctatgctctctgctcacacttgggcttgaataccacagagaaagaagcacagaggtcaatagtacaaggctgctctaggggacacctgtgagtgagccccacattggagggagtcttccccaccccatggtcttcatgatgcttgtaatcacgtagcatgttatgttcagtgctgagtcagatgtcgggcattagctctgtggtcttccctgctgacaggattaatggattctcagaggtgatttgaagactcaacaactggaggacaaaacccaatctgaggtcagactgcagcgaagtttcctgcctgctgcagtggaagacgggcgtgggcaatgccaagcgctacacagctatgggcacttggtgatctatgtgagcagtttaaacacatcataggctgaaataaagctaacgctgtttagtacataaaaaaaaaaaaaaaaaaaaaaaaaaaaaaaaaaaaaaaaaaaaa

SEQ ID NO: 201 - DNA, 2773 bp, Mus musculus
tgacgtcacggtcagcccacgccggggttgaagctgccgggcgccttcctcttgcatcgcggctgcagcttgcttctgttcccgcgcccgcttgcacatcctcctgctcgcgcggtcctgctgccgtccggtgctccccgtagccgctcaggcagagaggttttaaaatggaacatttcgatgcgtcactcagtacctatttcaaggccttcctgggcccccgagatacaagagtcaaaggatggttcctcctggacaattacatccctacgtttgtctgttctgttatttacttactcattgtatggctgggaccaaaatacatgaagaaccggcagccgttctcttgccgaggcatcctgcagttgtataaccttggactcaccctgctgtctctctacatgttctatgagttggtgacaggtgtgtgggaaggcaaatacaactttttctgccagggaacacgcagcgcgggagaatccgatatgaagatcatccgcgtcctctggtggtactacttctccaaactcatcgaattcatggacacctttttcttcatccttcgcaagaacaaccaccagatcaccgtgctccatgtctaccaccacgctaccatgctcaacatctggtggtttgtgatgaactgggttccctgcggccattcatattttggtgcgacactcaacagcttcatccatgtcctcatgtactcgtactatggtctgtcctccatcccgtccatgcgtccctacctctggtggaaaaagtacatcactcaagggcagctggtccagtttgtgctgacaatcatccagacgacctgcggggtcttctggccatgctccttccctctcgggtggctgttcttccagattggatacatgatttccctgattgctctcttcacaaacttctacattcagacttacaacaagaaaggggcctctcggaggaaagaccacctgaagggccaccagaacgggtctgtggccgccgtcaacggacacaccaacagcttcccttccctggaaaacagcgtgaagcccaggaagcagcgaaaggattgacaagccgagccgaagcctccagaccgcggcgtgtgattgtaagcacagcgtgacttgtgccctgacgctcatagcagctgctgtcactagtctggccctactatctgcagtgtgactcatgtaggaccttcttcatcagttcaaaacccctagaatatgtatacagattatacaaagtaggcatacgattttctcacatttctgggctctcatcgacccccgcgctagactgtggaaagggaatgttcttgtagtatacaacactgctgttgccttattagttgtaacacgataggtgctgaattgtggttcacaatttaaaacactgtaatccaaacttttttttttttaactgtagaccatgcatgtgattgtaaatttgtacaatgttgttaacagtagaaaaacacacatgccttaagacttaaaaaagcagggcccagagcttgttagtttaattagggtatgtttcaactttgtattattcatttgtattagctctgtttagaaaaatcaaatgtatgatttatgaaacaagtgtgtgatgtgtaacttcaagtgacttggagatgcgaaatctgatggcacccttggttttataacgatggctttaaataagcaggttcaagtctagtggaacagtcagtttaactttttaacagatcttatttttttattttgagtgccactattaatgtgtttaaagaggtggggaaagggtccaaagcgtctggagacacttacgtacctgtccctggtcccccagaggctagggtgactataagagtaggtcacttttcacttctgaagtgcttagtgtttttatacaggagataaaaaggccattcgacttcccaccacttggagagagagaactacctttcaggaaaggtgacgagacatttattatctgacagacacacacacacacacacacagtgataagggactggttacctgggtccacatttttttttattcttttctgtagtgctactttgacatacacttccttttaaaatgtgcctaatttaccaagagaccaggaagcaccataagcattttgaggtaaaatttaagagctggagcgcgcaggaactgggtgtttgggagcaaccgcttttttcagtgtgaatcatggtggcatctgtaatttttttctgattagcacctaaagatcggtttaaagtgcttggactgcttatcctaaaatcgtgtctagtgcgctcgaggcatcggtcatacaaatggggactcttttcatgtgtgtcatttttaaagtgttgaaagcttagcctttgaataccttctgcattggtaaaaaatccatggaaccactcatggcacatcttaggagatgattgacaatgtataaactaattgtgggtttgatatttatgtaaataccagtttaccatgctttaattttgcacattcatattacaaggagccagttggtcctaattagccttgtgggttttctgtttggaaggagttgcggcatctgtttacatttcccttgtcagatctagaatgtgtgtatgtgtgtgtcttctccctaggtacccgtctgcaggtgtctttacatatctcaatacaaaaattataacatttgatagtgtgctgtcaaagtgtgcttagctcatctggatatacccacactgttaaataatgtctaaacattaatcattaaaacctttttgatt

SEQ ID NO: 202 - DNA, 402 bp, Mus musculus
ggtcctctaagcgtcaccacgacttcaacgtcctgagtaccttctcctcacttactccgtagctccagcttcaccagatctcggaatggaccccaactgctcctgctccaccggcggctcctgcacttgcaccagctcctgcgcctgcaagaactgcaagtgcacctcctgcaagaagagctgctgctcctgctgtcccgtgggctgctccaaatgtgcccagggctgtgtctgcaaaggcgccgcggacaagtgcacgtgctgtgcctgatgtgacgaacagcgctgccaccacgtgtaaatagtatcggaccaacccagcgtcttcctatacagttccaccctgtttactaaacccccgttttctaccgagtacgtgaataataaaagcctgtttgagtc

SEQ ID NO: 203 - DNA, 1335 bp, Mus musculus
ggtgcttaatgttttgacctgtagaggtcctcacttttcgtcatggcgctgaaggtggcgatagctgctggcggtgctgcaaaggcaatgctcaagccaactctcctctgccgtccttgggaggttctggctgcccatgtggccccccgaaggagcatttcctcacaacaaacaattcctccatctgctaagtatggtgggcggcatacagtgactatgatcccaggggatggcatcggcccagagctcatgttgcatgttaagtctgtattcaggcatgcatgtgtgccggtggactttgaagaggtgcatgtaagctccaacgctgatgaggaggacatccgcaatgccatcatggccatccgccggaaccgtgtggccctgaagggcaacattgaaacaaatcataacctgccaccatcccacaaatctcgaaacaacatccttcgcaccagcctagacctctatgccaacgtcatccactgtaagagcctgccaggagtggtgacccggcacaaggacatagacatcctcattgtacgggaaaacacagaaggcgagtacagcagcctggagcatgagagcgtagcaggagtggtggagagcttgaagattatcaccaaagccaagtccctgcgcattgctgaatatgctttcaagctggcccaggagagtgggcgtaagaaagtgacggctgtgcacaaggccaacatcatgaaactgggtgatggactcttcctccagtgctgcagggaagtagcagcccactaccctcagatcacctttgacagcatgattgtagacaacacaacaatgcagctggtatcccggcctcagcagtttgatgtcatggtgatgcctaatctctatggtaacattgtcaacaacgtctgtgcagggctagttggaggcccaggccttgtggctggggccaactatggccatgtgtatgcagtattcgagacagctacaaggaacacaggcaaaagtattgccaataagaacattgctaacccgactgccacactgctagcaagctgcatgatgctagaccacctcaagctccactcctatgccacttccatccgcaaagctgtcttagcatccatggacaatgaaaatatgcataccccagatattggaggccagggcaccacatcccaagccatccaggacatcattcgtcatatccgcatcattaatggacgggctgtggaggcttagctatccctacagttttgctcagcttgtctgtaggactctcttctcactttagcactccagctagcttgggggacaggacccagaataaagccacttctgttccagaaaaaa

SEQ ID NO: 204 - DNA, 5094 bp, Mus musculus
  modified_base (4975)..(4975): a, c, g, t, unknown, or other
ggcaacgaggcggagtggagggcagagccagggaggagtgagcatgtttcgggacccgacagccgggtggctaacaccgccatcaccgctatcgctgctggtgatgctgttgctgctgtcgcgagtcggggctctgcgtcccgacgagctctttccttacggggagtcgtggggagaccagctgctgccggagggcgacgacgaaagctcagcagctgtgaagctggcaatacccctgcgtttttacgatgcccagttcagcagcctctacgtgggcaccaacggcatcatctccacccaggacttccccagggagactcaatatgtagatgatgattttcctactgacttcccagccatcgcccctttcctggctgacatcgacactagtcacagcaggggccggatcctgtaccgcgaggacacctccggagctgtgttgagcctggctgcccgctacgtgcgcactggcttcccgctgtcggggtccagcttcacccccacccacgcctttttggccacctgggagcacgtgggcgcctacgaggaggtcagtcgcggggctgcgccgtcaggagagctgaacactttccaggctgttctggcatccgatgaatctgatacctacgccttctttctctaccctgccaatggccttcagttctttggaacccgccccaaagagtcctacaatgtccagctgcagcttcccgctagggtgggcttttgccgaggggaagcggacgacctgaagagagaagcactgtatttcagcctgactaacaccgagcagtttgtgaagaatctttaccagctaagcaacctggggattcctggagtgtgggcttttcacatcggcagcaggtttgccctggacaatgtccgtccagccacagttggaggtgacccttccacagcccgttcttcagcactggagcaccccttcagccatgctgcagccctggagagctacaccgaggacagtttccattactacgatgagaatgaagaggatgttgagtacccaccagttgaaccgggggaggccccggaaggccacagcagaattgatgtgtctttcaattcaaaggctgatccaggccttgtggacgtcggcacttcatctccaggttccgaccgcgtttctccttggccatatccagcacatggtaactggccatcctaccgggaaacagaatgggcttctttggaccctcaaaccaaacaggggcggccggtgggagagggagaggttctggatttcagggacccagcggagcttttggaccagatgggtaccagagccccagctcctccagaggcagatgcagctctcctaactccagtcaacgaagaccttgggggcagaaacacccagtcttatccagaggcagggccagtgccttcagagccagatgttcctgtccctcctctggaaggagaagtccttcctcattaccccgagtctggtcacgttccgcccctgagaggagggaagtatgtgataggactggaggaccacgtgggatttaatgatcaagtcttcacgtataatggcgccaacctggaaacctgcgaacacagccacggccggtgctcccagcatgccttttgcaccgactacaccactggcttttgctgccactgccagtcgaggttttacggaaacgggaagcactgcctgccagaaggggcacctcaccgagtgaatgggaaagtgagtggtcgcctccgagtgggtcacattcctgtgcacttcactgacgtggatttacacgcttacatcgtgggcaatgatggcagagcctacactgccatcagccatgtcccacagccggcagcccaggccctgctccctgtcctgcccattggaggtctgtttggctggctctttgctttggagaagccaggctctgagaatggcttcagcctcacaggtgctacctttgtccatgacgtggaagtcacttttcaccctggagaggagagggtttgtatcactcaaactgccgaggggcttgacccagaaaactatttgagcattaagaccaacattgaaggccaggtgcccttcatcccagcgaatttcacagcccacattactccgtacaaagagttttatcattacagggactcagtcgtgacgtcctccagttcccgaagtttctctctcacttctggttctattaaccaaacgtggtcctaccacattgaccagaacatcacttaccaggcgtgcaggcacgcccccagacacctggccatccctgccacccagcagctgactgtcgaccgggcctttgctttgtacagtgaggatgagggcgtgctgaggtttgctgtgaccaatcagattggccctgttgaagtggattcagcccctgttggagtgaatccttgttacgacggaagccacacctgtgacacaacagcaaggtgccacccgggaacaggtgtagactacacctgcgagtgcacgcctgggttccagggtgacggacggagctgtgtggatgtcaatgagtgtgccactggcttccaccgctgtggccctaattctgtgtgtgtcaacttggtgggaagctacaggtgtgaatgccgcagtggctatgaatttgcagatgaccagcacacttgtattttgatcgccccacctcccaacccttgcttcgatggcagtcacacctgtgcccctgaggggcaagccaggtgcattcaccatggaggcagctcattcagttgtgcctgcctgccaggcttcattggcactgggcatcagtgttctgatgttgatgaatgtgcggaaaaccgatgtcatgaggcagctatttgctacaatacccccgggtccttctcctgccgttgccagcctgggtatcgaggggacgggtttcactgcacctctgacacggttccggaagattccatttcaggactgaagccctgtgaataccagcagcgttatgctcagacacagcacgcctaccctgggtcacggatccacatcccccagtgtgatgaccagggaaattttgtgccactgcagtgccacggcagcactggcttctgctggtgtgtggaccgaaatggccacgaagtccctggcacgcagactccacccggttccaccccgccccactgtggaccacctccagagcccacccagaggcctcggactgtttgtgagcgttggcgggaaagcctgctggaacactacggaggcacacccagggatgaccagtatgtgccccagtgtgatgacctgggccacttcatccccctgcagtgccatggaaagagtgatttctgttggtgtgtggacaaggatggcagagagctacagggcacgcgctcacagccaggcaccaggcctgcatgcatacccaccgtcgctccacccgtggtccggcccacaccccggcccgatgtgactcctccatctgtgggcaccttcctgttatatgcccagggccaacagattggccacttgcccttcaatggcagcaggcttcagaaggacgcagcccggaccctgctgtcactgcatggctccatagttgtggggattgactatgactgccgggagaggatggtttactggacagacgttgctggtcggaccatcagccgtgccagcttggaggcaggagccgaacccgagaccatcattacctcaggtttgataagcccggaaggacttgccatcgaccacttccgtagaacaatgtactggacagatagtggcctggataagatagagcgggccgaactggatggttccgagcggaaagtcctcttccacacagatctggtgaatccacgagccatcactgtggatccaatccgaggcaacttgtactggacagactggaatagagaagctcctaaaattgaaacatcatctttagatggcgaaaacagaaggattctgatcaacaaagatattggattacccaatggattgacctttgaccccttctccaaactgctttgctgggcagatgcaggaaccaaaaaactggagtgtacactacccgatggaactggacgacgtgtcatccaaaaccacctcaattaccccttcagcatcgtcagctatgcagatcacttttaccacacggactggcggagggatggtgttatatcagtgaataaggacagtggccagtttactgatgagtttctccctgagcagcggtctcatctctatgggatcactgcagtctacccgtactgtccaacaggaagaaaatgagcagcggtctcatctctatgggatcactgcagtctacccgtactgtccaacaggaagaaaatgaacactaaatgtataggaggatttcaagtttacaagaatcttgtcctaagaatatttgctacgaaggcaaagacagtggaaaaggaattggccattatgagctcttggcacacaagtgagcattttcagtgcagtgagactcaagtatattttgtgaaatgtatacctcaatctttactactgtatttttaaaaacaaaggttatcacaagtttaaaatagaatcttgtcttaagaatatttgttacgaaggcaaagacagtggaaaaggaattggccattatgagttcttggcacacaagtgagcattttcagtgcagtgagactcaagtatattttgtgaaatgtatacctcaatctttactactgtatttttaaaaacaaaggttatcacaagtttaaaatagaattttaatcattgcttattaaatcaacttttgtaaacagttatttaaaaggccaaattcattcaacatagaaccaatgagagcaaagacactaaatctgatttttgtttgccatggattctacctggccaagaaaagtaaagcaaacagatggctatgagaactgattcctgaagcccactgaggcccgccacagacggaccatggggttggcccagcgaagtcctcagactttatttatactaaggtgntacaaagagtccccaagtgcctctacagaagtatccctcaaaagtactccgggtaaaacaccaaagatgcagcagttcttcaattttctatataattccaataaaatattttaaagctt

SEQ ID NO: 205 - DNA, 3664 bp, Mus musculus
gttccgagacccggaggagagctggaccggagagggatggtactttgagtgaatgaccaccttggagaccgttcttctgtttcccttgttaccagccaggaggcagaagagtccaccggtccaggaaagacccatttcccttgagtttccagaaagtacctcatgcttgagagatcaggccaacaactatggctcttgtcttcagtgccctgctgttactggggctgtgtggaaagatctcttcagaaggtcagcctgcattccataacactcctggggctatgaattatgaattgcctaccaccaaatatgagacccaagataccttcaatgctgggattgttggccctctctacaaaatggtgcacatcttcctcaacgtggtccagccgaatgacttccctctagatttgatcaaaaaactcatacagaacaagaactttgacatctcagttgattccaaggagattgccctctatgagatcggagtccttatctgcgccatcctgggactgctgttcattatcctcatgcctctggtgggctgcttcttttgtatgtgccgttgctgcaacaaatgcggcggagagatgcaccagcggcagaagcagaatgcaccatgcaggaggaagtgcttgggcctctctctcctggtgatttgtctgctcatgagccttggcattatatatggctttgtggctaaccagcagaccaggactcggatcaaagggacccagaaactggcaaagagcaatttcagagactttcaaacactcctgactgaaacaccaaagcaaattgactatgtagtggagcagtacaccaacaccaagaacaaggcattctcagacctggatggcatcggctccgtgctgggaggcagaataaaggaccaactaaaacccaaagtaactcctgtcctcgaagagattaaggccatggcgacagccatcaaacagaccaaggatgccctgcagaacatgagcagcagcctgaaaagtctccaagatgcagccacccagctcaataccaacctgagctctgtgagaaacagcatcgagaattcgctcagcagcagtgactgtacctcagatccagccagcaagatctgcgatagcatcagaccaagcctaagcagtctggggagcagcctcaattcaagtcagctcccatcagtggatagagaactcaacactgttactgaagtcgacaaaactgatctggagagcctcgtcaaaagggggtatacgacaattgatgaaatacccaatacaatacaaaaccaaactgtggatgtcatcaaagacgtcaaaaataccttggactccattagctccaacattaaggacatgagccaaagtattcctattgaggatatgctgttacaggtctcccattaccttaataacagcaacagatacttaaaccaggagctgcccaagctggaagaatatgactcgtactggtggctgggtggcttgattgtctgctttctgctgactctcattgtgaccttctttttcctgggcttgctgtgtggtgtgtttggctatgacaagcatgccaccccaactagaagaggctgtgtgtccaacactggaggcatcttcctcatggctggggttggattcggcttccttttttgctggatattgatgatccttgtggttcttacgtttgttgttggtgcaaatgtggaaaagttgctctgcgaaccttatgaaaacaagaaattattacaggttttggacactccctatctgctcaaggaacaatggcaattttatctttctggcatgctattcaataacccagacattaacatgacctttgagcaagtctacagggattgcaaaagaggtcgaggtatatatgctgcttttcagcttgagaatgtcgtcaacgtcagtgatcatttcaacattgaccagatttctgaaaacataaatacggagttggaaaacctgaatgtgaacattgatagcattgaactgttggataacacaggaaggaagagcctcgaggactttgcacattctgggatagatacaatcgattattccacatacttgaaggagactgagaaatcccctactgaagtgaatctgctgacatttgcctctaccctggaagcaaaagcaaaccagttgcctgaaggaaagctgaaacaggccttcttactggatgtacagaatataagagccatccaccagcatctcctccctcctgtgcagcaatcactgaatacgttaagacaaagtgtctggaccctccagcaaacaagcaacaagttgccggagaaagtgaagaagatccttgcctctttggactctgttcagcatttcctcaccaataacgtttccctcatcgttatcggggaaacgaagaagtttgggaaaacaatactaggctactttgaacattatctgcactgggtcttttatgccatcacagagaagatgacatcctgcaaacccatggccaccgcgatggactctgctgttaatggcattctgtgtggctatgttgcggaccctctgaatttgttctggttcggcatagggaaagccacggtgctcttacttccggctgtaatcattgctatcaagctggccaagtactatcgcaggatggattcagaggatgtatacgacgatgttgagactgtgcccatgaaaaatttggaaatcgatagtaatggttatcataaagatcatttatatggtgttcacaatcctgttatgacaagcccgtctcgatactgacaactggagttgaagctgcttgaacaacaagatagtcaacatggaaagcatcacagattttggatagtttctgagtcttctagaacgttccaagtgcagaagaaacctggtggagactcaggcgggcactaggaacatggcatcagtggtcttagggatgcactttgtcaggaatgaacagtcatcatggttataagccacatatccattgcaactcatgaatgattctctcctgttttgtttttaacttttctttttacactgattttctatttagacactaaaacatataggggtgcttattccccctggatacatttacctgtgaaccagctattccggtgtcatagctgggtacctaacttacttccatatgtgaagtgtgctaaacacaaaccagtttacagaagagatgtattttgtgtatagtaaactgtatatatacccttttaccacagtcagttttttaaacaaatgaatactctagatttttcttctaaatgaggttactgttggggtggttgtgacctagtgatgctgtagaaaggagtctgcattcactaaaagtgtgtcaacctagagcaggcaatgcccttccttgtggatttccgtctgctcgttttggagctacctgcggtttagaaatagaattcaagaacaatcacggagtttcccacttgatgccactgccaaagtcagaacaagggatcttgagagaaggaactgtcgctcagctgggagcggaatcattatcgcaatcacaggtcctggttcacagtttagtggcactctctggtttgtaagaatgggcattacgttcagtgtcatctggtcatctgtgatgtgtgtcatcagcctgtcctgatgttgagatttaaaataaagcatgaatgaacaga

SEQ ID NO: 206 - DNA, 3713 bp, Mus musculus
cgggagacaaagcggcggccgtcggcttggcgcctcaggagtcgtcccgtgctcgcccagttcgctgcagaaatgactgccgtccacgcaggcaacataaacttcaaatgggaccccaaaagtctggagattaggactctggctgttgaaagactgttggagcctcttgttacacaggttacaaccctggtaaacaccaatagtaaagggccgtctaataaaaagagaggccgttctaagaaggcccatgttttggctgcatctgttgaacaagcaactgagaatttcttggaaaagggggataaaattgcaaaagagagccagtttctcaaggaggagcttgtggttgctgtagaagatgttcgaaaacaaggagatttgatgaagagcgctgctggggagtttgcagatgatccatgctcttctgtgaagcgaggcaacatggtccgggcagctcgagctttgctctctgccgtcacccggctgctgattctggctgacatggcagatgtctacaaattacttgttcagctgaaagttgtggaagatggtatattgaaactgaggaatgctggcaatgaacaagacttagggatacagtacaaagctctgaaaccagaagtagataagctgaacatcatggcagcaaaaagacaacaggaactaaaagatgtgggcaatcgtgatcagatggctgcagctagaggaatcctgcagaaaaatgttccaatcctctatactgcatcccaggcatgtctacaacaccctgatgttgcagcctataaggccaaccgggacttgatatacaagcagctgcagcaggccgtcacaggaatttctaatgcagcccaggctactgcatcagatgatgctgcccagcaccagggtggcagtggcggagagctggcatacgctctcaacaactttgataaacaaatcattgtggaccccttgagcttcagcgaggagcgctttaggccgtccctggaggagcgcctggaaagcattattagtggggctgccctgatggctgactcatcctgcacacgtgatgaccgtcgggagcgcattgtggcagagtgtaatgctgtccgccaggctctacaggacctgctctcagaatacatgggcaacgctggacgtaaagaaagaagtgatgcactcaactctgcaatagataaaatgaccaagaagaccagggacttgcgtagacagcttcgcaaagctgtcatggaccacgtatcagattctttcctggagaccaatgtccctctattagtactgattgaagctgcaaagaatggaaatgagaaagaagttaaggaatatgcccaagtttttcgtgaacatgccaacaaactgattgaggttgccaacctggcctgttcaatctccaacaatgaagaaggcgtgaagcttgtccgaatgtctgcaagccagttagaagcgctgtgtcctcaggttatcaatgctgcattggcgttggcagcaaagccgcagagtaaactggcccaagagaacatggatctttttaaagagcaatgggaaaagcaagtccgtgttctcacagatgctgttgatgacattacttccatcgatgacttcttggctgtctcagagaaccacattttagaagatgtgaacaagtgtgttattgctctccaagagaaagacgtggatgggctggatcgcactgccggtgccatccgaggccgggcagcccgagtcattcatgtagtcacctcagagatggacaactacgagccaggagtttacacagagaaggttctggaagccaccaagctcctctccaacacagtcatgccgcgcttcactgagcaggtggaagcagctgtggaagccctcagctcggacccggcccagcccatggatgagaatgagttcatcgacgcctcccgtctggtgtacgacggcatccgggacatccggaaagcagtgctgatgatcaggacccccgaggagttggacgactctgacttcgagactgaagactttgatgtcagaagcaggaccagtgtccagacagaagatgaccagctgatagctggccagagcgcccgggcgatcatggctcagcttcctcaggagcaaaaagcaaagattgcagaacaggtggccagtttccaggaagagaagagcaagctggatgctgaagtgtccaagtgggatgacagtggcaatgacatcattgtgctggccaagcagatgtgcatgatcatgatggagatgaccgacttcacccgaggcaaaggtccactcaaaaacacctctgacgtgatcagtgctgccaagaaaattgcggaggcgggatccaggatggacaagctcggccggaccatcgcagaccattgcccagactcggcatgcaagcaggacctgctggcctaccttcagcgcatcgctctctactgccaccagctcaacatctgcagcaaagtcaaggctgaagtacagaaccttggtggagagctggtcgtctctggggtggacagcgccatgtccctgatccaggcggccaagaacttgatgaatgctgttgtgcagacagtgaaggcgtcctacgtggcttccaccaaataccagaagtcacaggggatggcttccttgaaccttcctgctgtgtcatggaagatgaaggcccctgagaagaagccgttggtgaagagagagaagcaggatgagacgcagaccaagattaaacgagcttctcagaagaaacacgtgaacccagtgcaggccctgagcgagttcaaagccatggacagcatctgagcctgcacagcccatggggttctgaaaaaaaccagtcacatgcttcactcaaatgtatttgctaagtagagaacactgtcttattccacagggaggtagcagatttcagactcaaccaggtggtgaattttgcaaggacatgtttgtgttaaagctggttagaaaaaaaaagcttttagaattcaaaaatatatttctagctatatttttataagtttaatgaaaataacagttctgtaaccaaagagtaccacattaacttcttggtcacatttctgagtaggctgaagtgcctgctttctaggtaggggtgagcgcctgaggggagaggttgctttttagccctactgttgggcagatggaattaaatgaccaagggtggcccagtgtaaatcacagggcaccttagacggtctggagaaggaaggtaccagaaacctcttctgaggaataaactataggagacaataaaatataacacagtacccaggaagttgattgctttctttatgaagcagaaggggaattatgacgcatggctacagttactaatggactctgctgcagaacattaatggagttgctttattcgggctcgtgtgttgtgatgctgtaatcagaacatgcttccctgttattccagcttgaaatgcaaattcaccatcgggctcatttctaatcgtcgcagtgtttcctgctttgggccagcaaagaagcctgatgactgcatagggtttgcttaggcaatacttagacgcaccgtgtttgtgactactacagcaatcaccatagctacgagatgagattttactgtcttatttaaattttatgaatctgtctgttttttacactaattttcccaataaagtccattaagaaccaaaaaaaaaaaaaaaaaaaaaaaaaaaaaaaaaaaaaaa

SEQ ID NO: 207 - DNA, 1287 bp, Mus musculus
cctgccttccgctttagggtctgctgctctggttacagacctaggaaggggagtgcctaattgggattggtgcagggttgggagggacccgctgttttgtcctgcccacgtttctctagtagtctgtataaagtcacaactccaaacacacaggtcagtcctgctgaagccagtttgagaagaccacagcaccagcaccatgcctatgatactgggatactggaacgtccgcggactgacacacccgatccgcatgctcctggaatacacagactcaagctatgatgagaagagatacaccatgggtgacgctcccgactttgacagaagccagtggctgaatgagaagttcaagctgggcctggactttcccaatctgccttacttgatcgatggatcacacaagatcacccagagcaatgccatcctgcgctaccttgcccgaaagcaccacctggatggagagacagaggaggagaggatccgtgcagacattgtggagaaccaggtcatggacacccgcatgcagctcatcatgctctgttacaaccctgactttgagaagcagaagccagagttcttgaagaccatccctgagaaaatgaagctctactctgagttcctgggcaagaggccatggtttgcaggggacaaggtcacctatgtggatttccttgcttatgacattcttgaccagtaccgtatgtttgagcccaagtgcctggacgccttcccaaacctgagggacttcctggcccgcttcgagggcctcaagaagatctctgcctacatgaagagtagccgctacatcgcaacacctatattttcaaagatggcccactggagtaacaagtaggcccttgctacacgggcactcactaggaggacctgtccacactggggatcctgcaggccctgggtggggacagcaccctggccttctgcactgtggctcctggttctctctccttcccgctcccttctgcagcttggtcagccccatctcctcaccctcttcccagtcaagtccacacagccttcattctccccagtttctttcacatggccccttcttcattggctccctgacccaacctcacagcccgtttctgcgaactgaggtctgtcctgaactcacgcttcctagaattaccccgatggtcaacactatcttagtgctagccctccctagagttaccccgaagtcaatacttgagtgccagcctgttcctggtggagtagcctccccaggtctgtctcgtctacaataaagtctgaaacacactt

SEQ ID NO: 208 - DNA, 1790 bp, Mus musculus
gggcctcagcaacgcagtagtcgacagacttcaggctggggtgtggagccccggccaccgccgccactgacgacccccgccccccacatgcagcgccgcccctctgtggctgcccgtgaagcaaggctgccaagccccggctccgcctgcctccctacctcgcggctttctgcgtcctcgccgagcgggcgcgatgcggctgggcccaaggcccgcggcgctaggactgctgctgccgctgctgctgtacgccgcggtggctggcgccagcaaggcggaggaactgcactacccgcagggcgagcaccgggcggactacgaccgcgaagcgctgctgggtgtccaggaagacgtcgatgagtatgttaaacttggccacgaagagcagcaaagacgattgcagtcgatcataaagaaaattgactcggactctgatggctttcttactgaaaatgaactcagtcagtggattcagatgtcttttaagcattacgctatgcaagaagccaagcagcagtttgtggagtatgataagaacagcgacggcgatcctgtgacgtgggatgagtacaacatccagatgtacgaccgggtgattgactttgatgagaacactgctctggatgacacagaagaggggtcgttcaggcagcttcatctaaaggataagaagcgatttgaaaaagctaaccaggattcaggtcctggtctgagtcttgaagagttcattgcgtttgagcaccctgaagaagttgactatatgacggagttcgtcatccaagaggctttggaagaacatgacaaaaatggcgatgggtttgttagtttggaagaatttcttggcgattacaggcgggatccaactgcaaatgaagacccagaatggatacttgttgaaaaggacagatttgtgaatgattatgacaaagataatgatggccggcttgatccccaagagctgttgtcatgggtagtgcccaataaccagggcattgcacaagaggaagctcttcatctgattgatgagatggatttgaatagtgacaaaaagctctctgaagaagagattctggaaaaccaagacttgttccttaccagcgaccagacggattatggccgacagctccatgacgactacttctatcatgacgagctttaaccccccgagtgcgcccccagcaggatcggccttctgtagtttgctaccagttgactttttatgatgagatatagatgttgtcttttacactcttaagtcttaccacttcagatgatctaaacgcagattataacttttggccttttcaaagaaaacaaaacaagaacttgtcatttatttcaagacatattgaaggagtaaactattaatgttgtgccatatgaccacacagtctttcctaagtactccatctatgtagtgctgtgttgtggaatgttgagctctgttgccatacttgaagacatggaggatttagacatgtctaaacaatagtatttaagtagcacgtgatgaagctgtcagttttcgttcttgtactagtagacttacttttgaaactgacaaaggacagtgtttagatttagtgttttatcttaaagcctttaaaggaaccttcacaaggacttaaacctcacatagatgttgagaagttctacttaattttaaaatggtttctaaaaagggttttgtcgtatgaaatagaactttatatttttgcatatgtatagatagtaattatatttaatgtataactatagcattatggtgtgtggaaattgacattgtccag

SEQ ID NO: 209 - DNA, 1828 bp, Mus musculus
gagcagcgacagccccagctccagagacatggcgggcgttaaagctctcgtggcgctctccttcagtggggcaattgggctgacttttcttatgctgggatgtgcgttggaggactatggcgtttactggcccctgttcgtcttgattttctacgtcatctcccccatcccctacttcattgccaaaagggtcacatatgactccgacgcgaccagcagtgcctgtcgggaactggcgtatttcttcaccactgggattgttgtttctgcctttggacttcctgttgttcttgctcgtgtggatgtgatcaagtggggagcctgtggtcttgtgctggccggcaacgctgtcattttcctcacaattcaaggcttcttcctcgtctttggaagaggagatgatttcagttgggaacagtggtagcccctcctccccatggaaagcattgagtcttagaatttgtactgtacgtatatgtgtgcacatgtgtttcagatttgaatatgctgagtttttttatacctttatatcatgatcatcttagggaagatgttgtaaacaaaagatgagttttactcctggcacacaggtcactccattgactcaaagtgaattatttttatcttctagcttccagaaagcctgttactatggccttgtagacagctgctcacttatccagggggtctaaaccttttgccttggtttaggcttgggagacactggggcagatctcctacagcccaaacataggtggcgctctccctgtacacttagactcatctcatccacacagagcatcagcatctgctaggagcccattggggatgcagggtcagactgggtaactttgatgcgattgcacacttggcgcacgcacattgacgggtgaggaggtttgttgtagaggaataagcatcatagctcccctgccctctctgggtgttgcatgctcatttgcaggaaaaaaaaaaaaatcacctgccccctgctgtgaatgagttcagacttcaggtgtttctaacatgttcaatacttgtgttgttcctcaaatttgggggacctgttcttaggcaggaacagataagtcatccaaaaggcagtggctgattgctcagaataagatacaaaataaccaaaaaacccctctggggtgcaaggagggaaacttggctggaatggtccctactttaagtggagggcaggatagacaattcttggaaatgtccctctacggtgcctcccatcccccatgcagcatttggtttgctcttggtggtgggtctcctgaagggtatgaggcaagagtgagcagaggggagggagtcactgaagttacacgctggtgcacttttcatccttgatattgaacttgatgtcacctccacaggacacacagggatccacatcattttggttcttataaacagtttttctagctcatcttttttatctggagcctactgggagaaggaagtgagaactacaagcacccagtcaggatgccatcagcggtgtttaagcattgatgctgctcgctaatgagtgtccagagcactctcccttgaggcttgcggtccaaggagtcagcatccaggccagggctggtgtgacgctgggaccagcaggtgaatggacagaggacagtgtgcaatgttatattttggccttgtgcatgacattatgttttgaatattttgtgtacaaatagaattgttagcgttgtcatttctagtatttacattagaaaaattatttagatacttgatcatttaactggcatttttaatcatgacacttgctattgtaataaatttgacttttaac

SEQ ID NO: 210 - DNA, 646 bp, Mus musculus
gcagcagccatcctccagacggggcgattgttccagagtcagtaccatgagccacaattctcaagccttcttgtccaccaatgccgggcttcctccaagctatgagacaatcaaagaggagtacggggtgactgagctgggggaacccagcaactcagctgttgtgaggaccaccgtgatcaacatgcccagagaggtgtcggtgcctgaccatgtggtctggtccctgttcaatacactcttcttcaacgcctgctgcctgggcttcgttgcctatgcctactctgtgaagtctagggacaggaagatggtgggcgatgtggttggagcccaggcctacgcctccactgccaagtgcctgaatatcagctccctgatcttcagcatccttatggtcattatctgcatcattattttctctaccacctctgtggtagtctttcagtcttttgcacaaagaacaccccattctggattctagctgccctgtgctccacggtccacatctgccccgcccctgccccgcccccaggctcaagcctcgaccctttaccctacgcgtatgcaaatgttaccttcacctatctgtccacagtggattcaataaagtgcacggggtggcaactcaaaaaaaaaaaaaaaaaaa

SEQ ID NO: 211 - DNA, 3006 bp, Mus musculus
ggcacgaaggaccgggcggcggggggcgggcgctgcggcccggggctagccgggagactttccacgtttgcatcgccgcggcgcgcccagccttgcccctcgcctccccggagtccaggccgcgcgatggcattaggggcccggggctggcggcgccggtcgctgctcctgctgctgctctgggtgaccgggcaggcagccccggtgttgggcctggctgtgagctcggaacttcagatccagcagagcttcgtgcctgatgagtgtccgcgcacggtgcacagtggcgacttcgtgcgctaccactacgtggggactttcctcgacggccagaagttcgactccagctatgacagggactctaccttcaatgtgtttgtgggaaaaggccagctgatcgcagggatggaccaagctcttgttgggatgtgcgtaaacgagaggcgtcttgtgacgattcccccaaaccttgcctacggaagtgaaggagtttctggtgtgatccctccaaactcagttcttcattttgatgtactcttggtggatatctggaattctgaagaccaggttcacattcagacctatttcaagcctcccagttgccctcggactatccaagtatcggattttgtgaggtaccactacaacggaacgttcttggatgggacactgtttgattccagccataatcgcatgaaaacctatgacacgtacgtggggattggatggctgatccctggaatggacaaagggctgctgggcatgtgtgtcggcgagaagcgtatcatcacagtccccccttttctggcctacggggaggagggaaatggagaagacatccctgggcaggcatccttagtctttgatgttgcattgttggacctccataaccccaaggataccatttccattgagaataaggtggttcctgagaactgtgagaggagaagtcagagtggggacttcctcaggtatcattacaatggcacacttctggacggcactctctttgactccagctattcacggaaccacacctttgacacatacattgggcagggctatgtaattcctgggatggatgaaggcttacttggtgtctgcattggggaaaggcgaaggattgtggtccctcctcacctgggctacggagaaaaaggcagagggagcattcctgcctcagccgtgctggtgttcgacatccactttattgacgtgcacaacccttcggattccatcagcatcacttcccactacaaccctccagactgctcggtgctgattaagaagggggattacctcaaataccactacaatgcctcactcctggatgggactctgctggactccacgtggaacttaggcaaaacgtataacattgtgttggggtctggacaagtcgtgctggggatggacatgggtctcagagagatgtgcgtgggagagaagcggactgtgatcatcccgccccacctgggctatggagaagctggtgtggatggagaggtccctggcagtgccgtcctagtgtttgacatcgaactgctggaccttgtgtctggccttccggaggggtacatgttcatatggaatggtgaagtgtctcccaacctctttgaagaaatcgacagggatggcaatggggaagtcctcctggaggagttctcagagtacattcatgcccaagtggcaacaggcaaagggaagctggctcctggctttaatgctgaaatgatcgtgaagaatatgttcaccaaccaggaccggaatggaaatgggaaggtcacggctgaggaatttaaactgaaggatcaggaagccaaacatgatgaactgtaagcctgacacagatcagtgtgtgccaagggagtgcatgacaccaagcgacctgtcgtggcggaacatgctgtcaaggtgtgaagctttctaggaaggtttgagagtagccagaattaggtgggccatgtagtacctggtgcagacagtggggggtggctgatgcccacggtgaggacttgggtggatttccagtgacagtaaagaaaatctgtatatagtgctttggcacaaatgcaattggtctgaagcaccaattgcacttgtgagtcttctgggaggttgtgttaataaaggaaaattatttcatagaagatgtagctgtcatggaggaaacagaagaagttcccaggtgtctacctaaagaaacgatttggtttaaaagtcttgctaatgtcttcaaaaaagttcaccatgggcagaaagataaaggcacacatgtttcagcaagtgtccttgacagcagccattgctcttctcagtgttctgtgcaagctctggtgataccaggccccgtgcgacacccatcctgtcaccttccctacaaatctccattttcatgctttccagttcactctctacactggcagccctccaattggtagtgtctgtcacttaaaggttaacaggagtctcctggacaggaaaaacacagaccaaatggaagctgtctttagtccatgagtagaggatttgacctgcattttctacataggattggctttctctttctccactctattcctttggggagatacatgatggctgggtctcactggtcggccaacagaaaattctactgtgactaaagtggatgtgttatcccaacaaatgaaggtgacactttctgttctccccccccccatttgtgtcttggaaggcaatttgaggtctcctgctgtagaaaaggctagcccattcccacaccatgtggtagctatgctcctactttatgtcctcagataccaatgatgttggcactcactctgacgtaatcaggacatttccgtttgaaatggcgttttttacaaagttaaactgttttgtactgatgttgccctgagatagttcatgcaaatgctgtgcactcatttcagtggaatatagttggaaaactgacttctttttttctgacataaaatgttgaatcataaaaaaaaaaaaaaaaaa

SEQ ID NO: 212 - DNA, 1979 bp, Mus musculus
cgtcatcctgcctataagccggcgacctctggctttaagctttgctctcttcgggccgccgcgaccatgaagactcccggcgtcttgctgctcattctcggcctcctggcttcgtcctccttcgcgattatcagaatccctctgcgcaagttcacatctatccgtcggactatgacggaggtgggcggctctgtggaagacctgatcctcaaaggccccatcaccaagtactccatgcagtcatcgcctaagaccacggagccagtgtcagagttactcaaaaactacctggatgcccagtactatggcgatatcggcatcggaaccccgccgcagtgtttcacagtcgtctttgatactggctcctctaacctgtgggtcccctccattcattgcaagatacttgacatagcctgctgggtccaccataagtacaacagtgacaagtccagcacctatgtgaagaacggcacgtcctttgacatccactacggctcaggaagcctctctgggtacctgagccaggacactgtatcggttccatgtaagtctgaccagtcaaaggcaagaggtatcaaggtggagaaacagatctttggagaagccaccaagcagcctggaatcgtatttgttgcagccaagtttgatggcatcttgggcatgggctaccctcatatctctgttaacaacgtgcttccggtctttgacaacctgatgcaacagaagctggtggacaagaacatcttctccttctacctgaacagggacccagaagggcaacccggaggagaactaatgcttggtggcactgactccaagtactaccacggggagctgtcctacctgaacgtcactcgaaaggcctactggcaggtgcacatggaccagttggaggtgggcaatgagctgaccctgtgcaagggaggctgtgaggctattgtggacacagggacatctcttctggtggggcctgtggaagaggtgaaggagctgcagaaggccatcggggcagtgcctcttatccagggtgagtatatgattccttgtgagaaggtgtccagcctgcccacggtctacctgaagctaggaggcaaaaactatgaactacacccagacaagtatatactcaaggtatcgcagggtggaaagacaatctgcctgagtggcttcatgggaatggacataccccctcccagtgggccgctctggatcctgggcgatgtcttcattggttcctactacactgtgtttgacagagacaacaatagggtcggctttgccaatgctgtcgtactctaacttgctccttctccactgtcagggaactggatcagagtccagtagaggaagccagccagccccatccctccacctgccccactcacacatagtcacactcgcttagtgttgctggacccttgggggagacctggctggagcttgtccagctgttctgttctgtggttcctcaccctgggttcagattgctgccctctgcctgtctgaaggaggccaaggcccacccagtacacgaggctgccttcaaaggcccctactggtttaatagctgctgagatggattgtcttgtcctgccgccctttgctgtgtgggcagtactctgaagcaggcaaatgggtcttaggatccctcccagaaacctgctctgacccagacccatcacccagcttggggatggcaccacgttctactgcccctccaactctggcctggcaaaggcctgaaggtgagcaggaaggagcaagaggacagaagcaaaactatgaacctggggggttacctagggcttgaccccgccctcctgggaaggcatgcctcagcctggggtagaggtaggatgactgactggttttggctggcctctgctgccctcatcctgggctaggcagctgggagccaaagttgaaatacaaataaagttgttttgggccttgaaaaaaaaaaaaaaaaaaaaaaaaaa

SEQ ID NO: 213 - DNA, 4124 bp, Mus musculus
ggtgttctgcctgtcgtgcctggcaagcgaggcgctccttcacccagccgtcgcagtcgcttccctgagccggagcggagctggcggagagatggcctcccagccgccgccgccccccaaaccctgggagtctcgcagaattcccggggccggccccgggccgggctccggccccggccccacttaccaatctgctgatttgggccctactttattgacaagacctggacaaccaacacttacaagagtgcccccgcctattcttcccaggccatcccagcagacagggagcaacaatgtaaacactttcagacctgcttacagttcattttcttctggatatggagcctacggaaattcattttatggaagctatagcccttatagttatggatacaatggtttgggctttaaccgcctccgtgtagatgatcttcctcccagtaggtttgttcagcaagctgaagaaagcagcagaggtgcatttcagtccattgaaagtattgtgcatgcatttgcctctgtcagcatgatgatggatgctaccttttcagccgtctataacagtttcagggctgtattggatgtagcaaatcacttttcccggctaaaaatacactttacaaaggttttttcagcctttgcattagttaggactataagatatctttatagacggttacagtggatgatgggtttaagaagaggctctgagaatgaggacctgtgggcagaaagtgaaggaactgtggcctgccttagtgctgaggaccaggcaactaactcagcaaaatcttggccaatattcctgttctttgctgttatccttggcggtccttatctcatctggaaacttctatctacacacaatgatgaagtaacagacaacaccaactgggcaagtggtgaggatgaccacgtagttgcaagagcagagtacgattttgttgccgtgtctgatgaagaaatttctttccgtgctggtgatatgctaaatttagccctcaaagaacaacaacccaaagtgcgtggttggcttctggctagtcttgacggtcaaacaacaggacttatacctgcaaattatgtcaaaattcttggtaaaagaagaggcagaaaaacaatagaatcgagtacaatgctcaagcaacaacagtcttttaccaacccaacattaattaaaggagtcactaccaccaatcctttggatgaacaggaagctgcctttgaatctgtttttgttgaaactaataaggtttccagtgcacctgattctacagggaaaaatggagacaaacaagatctttgatgtgtttcatgtttgtgggcaggtgaacaatattttagagtattttaaaaaatcatttcttacagagaaattaatttgcagttgaatgaaagcatttgctcgtggctgtgccgagtgttctgctgctagaagttatgtagtcacacgctagctgctagtcaagtgatctgtctacacttgactgtcttgtggaccacgaggacatttgtttcacctagtttttaagattatggagatagttgtcagctccatcttatctcagtccctaggcttattggaacagtaaatttgatgaacagtagaacacacaagctgcctcagaagggatcattaacgcttcttagagttctgagttagttgacttgaagtcttcaaaaattgagtgataacatctacttataagaacagacaaaaggctaatttttttaaccttataaataaactaaataataaaaattttctcatctgtattatgtccagtgttgaatttactttaggtgatgtgtttttaccagcaaataattgatagtattatcttttattgtatttataaaagtgtgttcttaagaggtcactggagcactgtgaagaagatggttctgactgacagcttcttaacctccttacagtgtcacagatctcatcctgagcgagtcacaatatatagctagatctcatcctgagcgagtcacaatatatggatttttgttcttttcctccaactaaggcaggagtcctttaagattatacttaatgatataatcaattctggcagtaatgatttttaatcctgaattttctgcttctatataagataattacttttgtaaattccaaaatcaggttatacattaaatatttgaaatatgtctgtcggggttggggatttagctcagtggtagagcgcttgcttgcaaggccctgggttcggtcctcagctctggaaagaaaaacacaaaataacaaaaggaccaaaaaaacccaaggtaactgaaatatgtctgtcacattggatagatttcttgtggttttcactactgagactataatttgcttgctatttcaaatacgatgactttttgtttggttgttttttttttgcttaatagtgaattttatgtgtttccccatagaattggaagctttatacgcttgctgtgaatatactacagattagaactgtcagaaataaatcacagaattcatttatagacactactaacagctgtgggttttgataaaaagtgatttgggttttgcttctttcatatagataggtttatcaaataaataattctggaggagttcatattaaaccatgtctaacccaatatctgctcagaacagaagcactaaagacttcctaggaagcccttttttgaaatgacaatataataagtaatgtatcttttcatcttaagatagagagaagcatttacggtactcatttatcttttaggctgatttttctgacattcagtagtaacttttcagttgagaaagggggttgaataatctaccactgaggcatggccctgactctcaaaggttttaacaaatatttacttctgacttgagatgcctgaacttttctcatgtctaaatgttactccagacatctagactaagcactaggagtaaagtagaaataaaatgttgagtcagcactatttaggtttggggtgttgttttgttttagaagatgagctttaaaataggatttgtgactaatatttcagttgtataggaaagagcttagacaaataaatgataaaactttcttttagggtctttattgtttggctgtctatgctagattatatagtattaacctaataactacctgtgtccattcttttttatttgtttgtttgtttgtttgtttgtttgtttcaagacagggtttctctatataggcctggctgtcctggaactcactttgtagaccagactggcttcgaactcagaaatctgcctcccaagtgctgggattaaaggcatgcgccaccaccgctcggcctgtgtccattctttattaaagtcttagaaaaacagttgtaggactagagtggcagaaagttttgtggtttagagtaaatgaatagattggtcacagctccaatataattttagggacttcctgaagtagcattacatcacaggaaactacactttcaattaaataattcataagctacagtaagaaactagatatcagaagctttaattgtattttgtcagcttgggaagaaaaagattaaaggactataaatgcattttcatgttctacatcttactcaagtcttagccaattattcatttacctgagtgcagcggctctttattttatgctgtctttactggaaaaagaaatgaaatacagttaaatttgtatttttaataggttgtgaaaatactttactggagaattaaaaatatttgaaacttaatttctttttttaagattatagctgcaacagaaccataacatatactccacacaaagcacagtacaatgtgaatgcatgcatgttcctctctctgctaataacaagaagagtgtttcttttagtgttcacatgtactgttagttaaaacgcattaagtggtaaaggggtgtttataagaagaaccaaagaactcttctaacaaatagatgtcatgttctaaatgtgataagtgagttattaatggtatgtgattttctttggtttgtaacactatgactttaccgtattttcacgtgtacatttcacagaagattctacgttatagctggaggaaaagtactttatcaaagatgctacacaaaacg

SEQ ID NO: 214 - DNA, 3192 bp, Mus musculus
actcggccactctgcggagcaggcatgggagccgcgcgcgtcctccgggcgcccacacctgtctgagcggcgcacggccgcggccccggcgggctgctccacgcggtagcactcagcatggctggaatcccggggctcttcatccttcttgtcctgctctgtgtgttcatgcaggtgagtccctacaccgttccgtggaaacccacatggccggcttatcgcctccctgtagtcttgcctcagtctaccctcaacttagctaaggcagacttcgacgccaaagcgaaattggaggtgtcctcctcatgtggacctcagtgtcacaagggaacaccactgcccacctacgaagaggccaagcagtacctttcctatgaaaccctttatgccaatggcagccgcacagagactcgggtgggcatctacatcctcagcaatggtgaaggcagggcacgaggcagagactcggaggccacagggagatctcgcaggaagaggcagatttatggctacgatggcaggtttagcatttttgggaaggacttcctgctcaattatcctttctcaacatcggtgaagttgtctactggctgcactggcaccctggtggcagagaagcacgtcctcactgctgcccactgcatacacgatgggaaaacctatgtgaaagggacacagaaactccgagtgggcttcctgaagcccaagtataaagatggtgccggaggggacaacagctcgagctcagccatgccagacaagatgaagtttcagtggatccgcgtgaaacgcacccatgtgcccaaggggtggatcaagggcaatgccaatgacatcggcatggattatgactacgccctgctggaactcaagaaaccccacaaaagacagttcatgaagattggtgtgagtcctccagcgaagcagctcccagggggcaggatccacttctctggttatgacaatgaccggcccggcaatttggtgtaccgcttctgtgatgtcaaagatgagacctacgaccttctctaccagcagtgtgacgcccagcccggggccagtggttcaggggtctatgtgaggatgtggaagagaccacagcagaaatgggaaagaaaaattatcggcatcttttcagggcaccagtgggtggacatgaatggctctccacaggatttcaacgtggcagttagaatcacgcctcttaaatatgcccagatttgctattggattaaaggaaactacctagattgcagggaggggtgacatgcgtcttcttgccagcaccaatggtctttttgcactcattgtaggagaggctagctttttatcattgactcttgtggtgtgagtcacatagtatcttttacctagtattcttcaaatggcaaaaattattggctatattattttaaaactgttgtgtgcgttatagcatttaagcagtctgaaagcatacttttgcatagagactttaaagtattcgggtaatagggcctatttgacaaggaagttaaactttcagtttttggagaattctaatttttgtctgatccaaacttgcttcagaggtttatatcaaatacgtgacacacagggaatatgaattcttatgtttgtatatgtatatgttttcttctgagagtcatatattgatatttttgtaatgtgtggttattatgcttccagataatgatagcaaagtcttcaataggcaatttataatgttttggattcaaacatttacgtagtagtccttgaagagaacaataatttattggctatattgatacccatataagactgtatcttacagtgcacagaattcccacgctgcttttagttttgaaaataaaactttcccttgtaaaaactgctgttctgcttttgtgggacgtctgtatacagttctgcaaagcttgctatcacaccagagtgggcaagaccattaattccaatcctcctcttggcaaggttttattcgcatgtctgaagctaacagtttctcgaaagacagtaagtggagcctaattagaacaggctgaaaagcttcccagctagcacttgtggctacaataaaaaacaattcttggattttctccccacagtgaggcacatctcacagtttatcatttggatgagtaatttaaaatgaattaaattccagagaacaatggatgcactgctccatagatgtcactgcagagtaaccacttgtttgaagcctagcataatcgcacagcctaatccagatttattctgcttagtttttcaacgtttccagagagctttacatttgtttagttggtaaacttttctctctcactgcacttattctatagtttaaaaaaaaagtttgaaagtagctttaggaaaaccagtatagctttattttcccgacttcaaagtggcatctcgtgctggaatggtctaggctataggaacataaaaccagacatagcagtcagaaaaacaactggaggtggtgggtgagatggcccagcaggcaaggatatttgctgccaagcctgccagcctgagtgcaattcgtgggacccaaatgtggaagaggagaactgactcccacaggttgacctctgacctccactggcacaccagtgcaatcccataaatacacaaatgtaatttcaaaatcagagggctggagaatggctaagtagtgaagaatgtttgctgaggaaacatgtggactgagattcaattcctcctggaacataagatgaacagacatgtaatcccagtactatcagggacaaagataggaggactgatggtccttgctggcttctggcccaactccaagttcagagagagactttgctacagaggaataaggcagagaataataaagcagaacactggatgtcctcctctggcaatacacacacacacacacacacacacccagacacactacataaaataattcaaacaatgggggagaatacaaaaactaacaagaatcatacattttagtaaatgttatgtaaacagaatcacagcattagggagaaattactgacttattttgtagtttcatcttgtgactcttagtctaaatctatcagcgaggagacaagcaacatgaggtcgatgtttgaggggttgcatgctgggtaattttagcttacattgtagctctaagaacattcaaatataacactgtcaatt

SEQ ID NO: 215 - DNA, 2718 bp, Mus musculus
aaggacccgtgagtgaggttcgcacgccgcgactcaactgccccacactgcggctgccgggcacggccctgccaagcgggaccgccgcgactgacctttgccgggagcccattctggcaagtggcgtgtgccgcgggtccctggcgtcccctccggcgcgctcttggagccacttcccggagcggaagtctgcctgctcgggctccggtgggacctgctcggaggaatggcgccgccgggttcaagcgctgtcttcctgttggccctgacaatcactgccagcgtccaggctctgacccccacccactacctcaccaagcaggatgtggaaaggctgaaggcctcactggaccgccccttcacagatttggagtctgccttctactccatcgtgggactcagcagccttggggtacaggtgccagatgtcaagaaagcgtgtaccttcatcaagtccaaccttgatcccagcaacgtggattctctcttctatgcagcccagtccagccaggtcctctcaggctgtgagatatctgtttcaaatgagaccaaagagctcctgctggcagcagtgagtgaagactcccccattgcccagatctaccatgcagttgcagcactcagcgggtttgggcttcccttggcatccaatgaagccctcggtgcccttaccgctcgcctcggcaaggaagagactgtgctagcaacggtccaggctctgcagacagcgtcccacctctcccagcaggctgacctgaggaacattgtagaggagattgaggaccttgttgctcggctggatgaactagggggtgtgtatctgcagtttgaggaaggactggagctcacggcgctgtttgttgctgccacctacaagctcatggaccacgtggggaccgaaccgtccatgaaggaggatcaggttatccagctcatgaacacaatcttcagcaagaagaactttgagtccctctcagaagccttcagtgtggcctctgctgctgctgcattgtcccagaatcgctaccacgtaccagtggtggttgtgcccgagggctctacttctgacactcaagaacaggctatcctgaggttgcaggtcagcaatgttttgtctcagcctctggctcaagctgcagtgaagctggagcatgctaagtcggcggctaccagggctaccgtcctgcagaagacgcccttttcgcttgtggggaatgtttttgagctaaacttcaagaatgttaaactttccagtggctactatgacttctctgtccgagttgaaggtgacagccgttacattgcaaacactgtagagcttcgagtcaagatctccactgaagttggcatcacaaatgttgatctttccactgtggataaggatcagagcattgcacccaaaactacccgggtgacctacccagccaaagccaagggtacattcatcgcagacagccatcagaactttgccctgtttttccagctggtagatgtgaacaccggtgcggagctcacccctcaccagacgtttgttcgacttcataaccagaagactggccaggaagtggtgtttgttgctgagccagataacaagaatgtatataagtttgaactggacacctctgaaaggaagattgaatttgactctgcctctggcacctacacactctacttaatcatcggggatgccacattgaagaacccaatcctctggaacgtggctgacgtggttatcaagttccctgaggaggaagccccctcgactgtgctgtcccagagcctgtttaccccaaaacaggaaattcagcacctgttccgagagcctgagaagaggccccccacagtggtgtccaatacattcacggccctcatcctctcgcccttgctcctgctctttgcactgtggatccggattggagccaatgtctccaacttcacatttgctcctagcacagttatcttccacctgggacatgctgcgatgctgggcctcatgtatatctactggactcagctcaacatgttccagaccctcaagtacctggctgtcctgggcactgtgacgtttctggctggcaaccgaatgctggcccagcatgcagttaagagaacagcacattagttccagaagaagtctgaagaccctgaaggctgaaatgaacatttaacaaggagtggggacagttcatggtgtgaaaggaagaactggggacacaacaggagggaggagatgcctgttcgttaaaaagagaaaagctgagctgtgcttacatgtttacttgtttctcactttttgcttcacagagcagacatgtttgggcccagattgtctgtccctttgtcttgatgcctggcaagatgctgtgaatatcccaggctacccagatgttgtatttgaaaagttgaaatctgtaattcatcatcagctttggaataaagagaatggtggactcccagtgttgatggagccttgcatgtgtgatatgaagactcagcagtcttcagttgggccatctcacccctttcttaaaagtactaaaagtggctagaaaaagcctgtgtcctttcggctccagtagcaaacactttgtaggagccctgcttgtctttgaagattcttctcttcaaaagacctgctctaggcttttgccttgaacatttgggcttggtgtgtagagaagggttaaaattttgtcaataaaaagctgactgcctcgc

SEQ ID NO: 216 - DNA, 2295 bp, Mus musculus
agtcagggacctttcctataggcaaaggtcatagggccttgtttggggatgggtggaagggagttctatgtagtggagctgaaggcgcatcctattgaaaagtgacctcggctgaaggccaaaggttctgcctcatggaaacttctgcggccgctgcatctgcgggaggcttcttcccctccttcctgctcctggcgtttgggacgctggtggctgccgtgctgggcgtcgctcacagactggggctcttctatcagctgatgcacaaggtggacaagacaagcatccggcatggtggagagagtgtcgcagctgtgctccgagcccatggtgtacgctttgtcttcacattggtcggtgggcacatttccccactgctggtggcctgtgagaagctgggtatccgagtggtagacacacgccacgaggtcactgctgtctttgctgctgatgctgtggcccgcctgactgggacagtgggtgtggcagcagtgacagccggtcctggcctcaccaacactgtgactgcagtgaagaatgcacaagtggcacagtccccagtcctgcttttgggtggagctgccagcaccctgctgcagaaacggggcgcacttcaggccattgatcagatgtctctgttcaggccactctgcaagttttgtgcttctgtgcgaagggtacgggacattgtacctaccctgaggactgcaatagctgctgcccagtcaggcaccccaggtccagtgtttgtggagctgcctcttgatgtactatatccttacttcatggttgagaaggagatgataccaaccaagttgcccaatagcctcatgggccgtgtggttgtctggtatttacagaactgcctggccaacctctttgttggggcttgggaacctcgtcccgagggacctctgcccttggatattccccaggcatctccgcagcaggtccagcgctgtgtggagatcctgagccgggccaagaggcctctgctggtactggggagccaggccttgctgcccccgacccctgccaacaagcttagagctgccgtggagaccctgggtgtcccctgctttctaggggggatgtctcgggggctgctgggccgcaaccaccctctccacatccggcagaaccgcagcgctgctctgaagaaagcagatgttgttgtcctggcaggcgctgtgtgtgatttccgcctgtcttatggccgggtcctcaaccgcaagagcagcatcatcattgtcaaccggaaccgggatgatctcttgctcaactcggacatcttctggaagcctcaggaggctgtgcagggagatgtgggctccttcatgataaaactggtggaaggccttcagggccagatgtggtcttcagattgggctgaggagcttcggaaagctgaccagcagaaggagcagacctatcgggataaggctttaatgcctgtattacagcacctgaacccagtatgggtgttacagcaggtggaggaaactctgcctgacaatgcacttcttgtggttgacggaggggactttgtggccactgctgcctacttagtccagcccagagggcctctgcgctggctcgatcctggggcctttgggactctgggagttggcgcaggttttgcacttggggccaagctgtgtcagccggaggctgaggtttggtgcctgtttggggatggagcctttggctacagcctcattgagtttgacacgttcgtcagacataaggtaccagtgatagccttggtaggaaacgatgcaggttggacccagatttctcgagagcaggtgcccaggttgggcagtgatgtagcctgtagcctggcttacactgattatcacaaggcagccatgggcctgggggcccagggattgatactctcacgggacaataaggatcaagtggtcaaggtacttcgtgaaggccagcagctgtgccaggatggtcatgcagttgtggtcaacatcctgattgggaggacagacttccgagatggctccatttctgtatagggactatccagggttagtgtgcttgcctctttggaccaggactttgtctacctggagttttcatccttgcctgtcctgagcttgtctcataaggtctaaccctctaagtggggaatgtgggggtggggaaccaaagctcaaagaggcaccttggcaaccctgggtagctctttccaaaaggttcagctgtaccctctctcttacaaaattaataaatctcttggctatatgagcccaaggactcaaaaaaaaaaaaaaaaaa

SEQ ID NO: 217 - DNA, 1581 bp, Mus musculus
gccctgcagtttctgctgggcctaagcctccgggctcagtttgaccacagtatctagctatggcggcagtgacctggagtcgggctcgatgctggtgtccgaggtaagcttgcagcctcgactctccggcccaaagtcgccagcgggaattttcgcccgcccacggagccgcccgctttgtcatctggcctggctagcgagacagcaggatattactttgacgatttcccagcgagagagctctaaagagtgacctcgaaggttcttcctctgctgagtcccaaaggtgtcctgcaggtcttcagattacaagtggctaaactgcacttgggcagaccaacaatgagagccagtcagcaggactttgaaaatgcattgaaccaggtgaaactcttgaagaaggacccgggaaacgaagtgaagctaagactctatgcactgtacaagcaggccacagaaggaacctgtaatatgcctaagcctggtatgcttgactttgtcaacaaagccaagtgggatgcatggaatgccctgggcagcctacccaaggaaactgccaggcagaactatgtggatctcgtatccagtttgagttcctcatctgaagccccgagccagggaaagcgtggagctgatgagaaagcccgggagtccaaagacatcctggtaacttctgaagatggtatcacgaagatcacgttcaatcggcccaccaaaaagaatgccatatccttccagatgtatcgggatattatactcgcacttaaaaatgccagcactgataacactgtcatggctgttttcacaggaactggtgactactactgcagtgggaatgacctgactaacttcactagtgccactggggggatagaggaggcagctagcaacggtgctgtgttactgagggactttgtaaacagttttatagactttcccaagcctctggttgcggtagtaaatggcccagctgtgggaatctctgtcacccttctgggactatttgatgctgtctttgcatcagacagggcaacgtttcatactccattcagccaactcggccagagcccggaagcatgctcctcttacacgtttccgaagatgatgggctcagcaaaggcagctgagatgcttctctttgggaagaagctgacagcaagagaggcctgggctcaaggccttgtcactgaagttttccctgagagcacttttgagacagaagtctggaccaggctgaaaacatatgcgaacgtcccgccaaacgccatgagaatttccaaagagttaatcagacaaaatgagaaagaaaagctctacgcagtcaacgctgaagagtgcactactctgcaagcaaggtggctgtcagaggagtgcatgaacgcaatcatgagcttcgtctccagaaaaccaaagctgtgaagaccaccacagcagctagactcctcatagggagcatgggctgggaggtccagtttcgaggactcaaacgacacatgcttctctgtgccttttccttgattaacgtagcaattatgatgagaattcttcacagtactgataaataaaacttttcataaatca

SEQ ID NO: 218 - DNA, 1557 bp, Mus musculus
caggaaaggagtcatgtgactctgaggctcttccgctgagtttaactagctgtggctgtatgtttcgctgttggggacctcactggggctgggtcccctgtgcccctaccccatggctccttttgagtctacttgtgtgttcagctccatttggcctgcagggagaagagactcgccaggtatctatggaggttatttccggctggccaaatccacagaacctgcttcatattcgggcagtgggcagcaactccaccctgcactatgtgtggagcagcctggggcctccagctgtggtgctggtggccactaacaccactcagagtgtcctgagtgtcaactggagtctcctgctgtctcccgatcctgctggggccctgatggtgctccccaagagcagcatacagttttcttctgctctcgtcttcaccaggctgcttgagtttgacagcaccaatgcgtccgagggggcacagcctccaggaaagccataccctccgtactccttggccaagttctcctggaacaatatcaccaactcattggatcttgccaacctgagtgccgattttcaaggccgccctgtagatgatcctactggagcattcgccaatggcagcctgaccttcaaggtccaagccttttctagatctggtcgacctgctcagccccctcgcctcctgcacacagcagatgtctgccagttagaagtggccctggttggagcttctcctcgtggaaaccattccctatttggtctagaggtagccaccttgggacagggccctgactgcccctcagtgaacgaacggaactccatcgatgatgaatatgcacctgccgtcttccagctgaaccagctgttatggggctcttctccatctggcttcatgcaatggcgaccagtggctttctctgaggaggagcgggcccgagaatcagccctcccctgccaggcttccactcttcactccaccttggcatcttctctccctcattcaccaattgttcaagccttcttcgggtcccagaacaacttctgtgccttcaatctgacctttggggctcccacgggccctggctactgggaccaatactacctttgctggtcaatgcttctgggcatgggcttccctccggtggatatcttctctccactagtcctcggaatcatggcggtagccctgggagccccaggactcatgttcctggggggaggcctatttctgctgctgcgccacaggcggtattctgagtaccagtccataaactgaaacccactctccagagggaagggcagtgtctcagactgtcggagggtggggggcccagggtcatgatctgcttttctgcagaacctcagaagccagcctcaacctactggggtgctcccagtaagttgtccttccaaacccacggagaggccacgctcacgggttcccaaactcccgtttcctgtggatgaaacttgaaggcctacatgagtgactgttggctgccctaaggggcatgaaatagacatttcccccatacaagaaaaaaaaaaaaaaaaaaaaa

SEQ ID NO: 219 - DNA, 2478 bp, Mus musculus
atgaagcgaggctgctggacggagcggaagctcgaggggcggagccatcttgcgagggtggagcgaaggggcgggctcaccttgcgcggagcgcaggcaggcgcgcgctgcgtcgcgtctcctcgcctgagggcctcggctctgcgggcccagccgctctacgccctcctcccgcgtctctcctccctcggcccggccaccccagctccgctgaggacaccaacagctgcacgcagcgcctcagcacgcgccgcctccccatctttggtggcggtcgtctctgaccatgcggtcccaggctgcagccgggtcataccgggagccaccccctgcctggcctttaccaagatggctgccccggaggacagaggcgcagaggcctcgaggccatcttggaagtggaacactcagaacggtagagagccccgcggccggcagggacgactgcagcttgaagatgctcaggatggctgtggtctccttgctgatttattgatatgcactgaacttgcagttgccctcgggctgctttccaagcctgtcctccacggcttctacagctggttctttagacataatggagagcttccgggcttgcacctagctcaggcccaccagtttgtggctgaagggaacacacagaaaatgcacaaatccataaacagaactgaaacgtgtgcttttgaaaagtggaatgaagaaaaagaagacctgattatttggagcgaactggggagggagtcaaagggtgaagggattgagggttctaagcccagacacagaatcaaaggaatttcagagactgcaattcctgctgccgccacagggtggagccagcctctagttctggggcctggagtcatgacccggaagtacatctccactttctccaccgcagagatggcggcggccgctctatcccggacgctgttgccagaggcccggcggcgcctgtggggatttacacgaaggcttccgcttcgccgcgccgctgctcagccgttgtactttggaggggaccgactaagaagcacacaggctgccccacaggttgtgctgaatgtccccgagacacaagtgacatgtttggaaaatggactcagagtagcttctgaaaactctgggctctcaacgtgcacagttgggctgtggatcgatgcgggaagtcgctatgagaatgagaagaacaacggcaccgcccacttcctggagcacatggccttcaagggcactaaaaagaggtcccagttagaccttgaacttgagattgagaatatgggcgctcatcttaacgcctatacctccagagagcagactgtctactacgccaaagcattctcgagagatttgcccagagctgtagaaattcttgctgacataattcagaacagcacactgggagaagcagagattgagcgtgagcggggagtaatcctgagagagatgcaggaagttgaaaccaacttgcaagaagttgtttttgattatcttcatgcgacagcctatcaaaatactgcacttggacggacaattctgggaccaactgaaaatatcaaatctataaatcgtaaggacctagtggattacataaccacacactacaagggaccaagaattgtactggctgccgccggaggtgtttgccataacgaactgctggagttagcaaagttccattttggtgactctttgtgctcacacaaaggagctataccagctctgcctccctgcaagttcactggaagtgagattcgggtgagggatgacaagatgccattggcgcaccttgcaatagctgttgaagcagttggttgggcccatccagacacgatctgtctcatggtcgcaaacacattgataggcaactgggatcgctcttttggaggaggaatgaatttatctagcaagctggcccaactcacttgccatggcaatctctgccacagcttccagtccttcaatacttcatatacagacacaggattatggggactctatatggtctgtgaacaagccacggttgctgacatgctgcacgttgtacaaaacgaatggaagcgtctgtgtacagatgtgactgagagtgaggttgcacgtgcaaaaaatcttctgaaaacaaacatgctgctgcagcttgatgggtcaactccaatttgtgaagacattggtaggcagatgctatgctataataggagaattcctatccccgagcttgaagcaagaattgatgctgtggatgcggagacggttcgacgagtgtgcaccaagtacattcatgacaaaagcccagctattgctgctctgggtcctattgagcgactaccagattttaaccagatttgtagtaacatgcgttggattcgtgactaatttttgtgatcaaatactctgcacatatatatttataaaactaagagactggaagttttcaaaactgccagtgttcaaatgaaaaaataaaaatatatttggaatttt

SEQ ID NO: 220 - DNA, 1342 bp, Mus musculus
ggaggaggaggcggcgacgggacgagaagggaggggaaggggccatggccgcccggtgaggcggcgaggcgggggggcagcccgaccccccggccccgggccccgggccccggggagaggcgaggacggaccgacggacatggggctccggagcagccgccgtcgccgccgccgccggaggacgcggccctgagaggccgccgggccccggcgcggccccccgggcgggccgtgttgccgcccgctgtgctatgagcagtcagagcgccgtctccacaagagtttacaaatgaaaatggaggaaatgtctttgtctggcctggataacagcaaactagaggccatcgctcaggagatatatgctgacctggtcgaggattcttgtttgggattctgctttgaagtacaccgggctgttaagtgtggctacttcttcctggatgatacggatcctgacagcatgaaggattttgagatcgtggaccagcctgggttggacatctttggacaggttttcaaccagtggaagagcaaggagtgtgtttgccccaattgcagccgcagtattgctgcttcccgctttgccccccacctggagaagtgcctgggaatgggtcgcaacagcagccgaatcgccaaccgtcggattgccaatagcaacaatatgaacaagtctgagagtgaccaagaagacaacgatgacatcaatgacaatgactggtcctatggctcagagaagaaagccaagaagagaaaatcagacaagaaccctaattcccctcgaagatccaagtctctaaaacacaaaaatggggaacttagcaactccgatccttttaagtatagcaactcaactgggatcagctatgagaccctgggtccagaggagctgcggagcctgctcaccacgcaatgtggagtgatttctgaacataccaagaagatgtgcacaaggtcactacgctgcccgcagcacacggatgaacagaggcgaaccgtacggatttatttccttgggccctcggccgttcttccagaggtagagagctccttggataacgatggctttgacatgactgatagccaggccctcatcagccggcttcagtgggacggctcttctgatctctcaccttctgattcaggctcctccaagactagtgaaaatcagggatggggtttaggtatgccatgtaccaacagctctgaatcacggaaaaccaagaaaaagaaatcccatctgagcttggtagggactgcctctggcctgggctccaacaagaagaaaaagccaaagccaccggctcccccaacgcccagcatctatgatgacatcaactga

SEQ ID NO: 221 - DNA, 1418 bp, Mus musculus
agttgacagagcactgaggggaacagtgtccccaaaagcgccaagatgcagccatggctctggctggtcttcagtatgaagctggcagctctctggagcagctctgccctcattcagaccccttcgtccctgctggttcaaaccaaccatacggcaaagatgtcctgtgaggttaaaagcatctctaagttaacaagcatctactggctgcgggagcgccaggaccccaaggacaagtactttgagttcctggcctcctggagttcttccaaaggagttttgtatggtgaaagtgtggacaagaaaagaaatataattcttgagtcttcagactcaagacggccctttctcagtatcatgaatgtgaagccagaggacagtgacttctacttctgcgcgacggttgggagccccaagatggtctttgggacagggacgaagctgactgtggttgatgtccttcctacaactgccccaaccaagaagactaccctgaagatgaagaagaagaagcaatgcccgttcccccacccagagacccagaagggcctgacatgcagccttaccaccctcagcctgctggtagtctgcatcctgcttctgctggcattcctcggagtggccgtctacttttactgtgtgcggaggagagcccgaattcacttcatgaaacagtttcacaaatgatcagcgcccacaacactgatagcctgctagcaataaaaggactgtaactcaatcaaagcaagatttgaactagtgagagacagcgcattcaagactggagaggcccttgcccttgctcaagctgcctgctttgaactgctgcaagctctgtgtgtggtctggggtctcacagggaaggccccagaacccaagctcactcacagagtggctgaagaaccaagaactcccacaccaccatgtactcttcttggactgggccttggacagtggccttccagccactgtctttgtcagttgcttggtatgacagccttattgactctttggcctttcatggaaaagagctagccgggaccctggagaagactgcaaatcctcacacagagaagccacctcatgaataaaagttttctgcaaacagtttcagggctctcagcagccatcttactctctcaggccttgccgtgggtttgggaggctgttggctcaggagacagacttctacttcatctcctagtaggcaagtttctaagcttcacttcttctctctcgtggcttatatatttcttctctcactctctgcccttttaatgaaaatgttttggctataaaaataaagtcctgccgggcgtggtggtgcatgcctttggtcccagcactcgggaggcagaggcaggcggatctctgagttcgaggccagcctggtctacagagtgagttccaggacagcc

SEQ ID NO: 222 - DNA, 1257 bp, Mus musculus
atgcctccgagacggtggtcaggggcctctggtcctagtcgacaactgggtaccatgccacgtttctccttgtctcgaatgactcctccactccctgccagggtggacttctccctggccggggcgctcaatgctggcttcaaggagacacgggcgagcgagcgtgcagagatgatggagctcaatgaccgctttgctagctacatcgagaaggtccgcttcctggaacagcaaaacaaggcgctggcagctgaactgaaccagcttcgagccaaggagcccaccaaactggctgatgtctaccaggcggagcttcgggagctgcggctgcggctggaccagcttacggccaacagtgcccggctggaggtggagagggacaactttgcacaggacctcggcaccctgaggcagaagctccaagatgaaaccaacctgaggctggaggcagagaacaacctggctgcgtatagacaggaggcacatgaagccaccctggctcgtgtggatttggagagaaaggttgaatcgctggaggaggagatccagttcttaaggaagatctatgaggaggaagttcgagatctccgggagcagctggcccaacagcaggtccacgtggagatggatgtggccaagccagacctcacagcggccctgagagagattcgcactcaatacgaggcagtggccaccagtaacatgcaagagacagaggagtggtatcggtctaagtttgcagacctcacagacgctgcgtcccgcaacgcagagctcctccgccaagccaaacacgaagctaacgactatcgccgccaactgcaggccttgacctgcgatctggagtccctccgcggcacgaacgagtccctagagcggcaaatgcgcgaacaggaagagcgccatgcgcgggagtcggccagttaccaggaggcacttgctcggctggaggaggagggccaaagcctcaaggaggagatggcccgccacctgcaggagtaccacgatctactcaacgttaagctagccctggacatcgagatcgccacctacaggaaattgctggagggcgaagaaaaccgcatcaccattcctgtacagactttctccaacctccagatccgagaaaccagcctggacaccaaatccgtgtcagaaggccacctcaagaggaacatcgtggtaaagactgtggagatgcgggatggtgaggtcattaaggactcgaagcaggagcacaaggacgtggtgatgtga

SEQ ID NO: 223 - DNA, 1130 bp, Mus musculus
cggcacgagatggcgttcagccaatcagcagagagcttggtcggggccggactgtatttactcctgcccaagggccaggtttcctcagatgcttcgagggtgtggggacagcgacagctcaccggagccgctgagcaaacatctaaagatggtgcctggtggaagaaagcattctgggaaatctgggaagccacctttggttgatcagcctaaaaaagcctttgactttgagaaagatgataaagatctgtctggttcagaagaagatgttgctgatgaaaaggctccagtaattgataaacatggaaagaaaagatctgctgggataattgaagatgttggaggtgaagtacagaatatgctggaaaaatttggagctgacatcaacaaagctcttcttgccaagaggaaaagaatagaaatgtataccaaagcttctttcaaagccagtaaccagaaaattgagcaaatttggaaaacacaacaagaggaaatacagaagcttaacaatgaatattctcagcaatttatgaatgtgttgcagcagtgggaactggatatacagaaatttgaggaacaaggagaaaaactatctaatctttttcgacaacaacaaaagatttttcagcagtctagaattgttcagagccagagaatgtttgcaatgaaacagatacacgagcagttcataaagagtttggaagatgtggaaaagaataatgataatctatttactggcacacaaagtgaacttaaaaaagaaatggctatgttgcaaaaaaaagttatgatggaaactcagcagcaagagatggcaaatgttcgaaagtctcttcaatccatgttattctgatgagtctttgaagaaagaacttgaacctatgtaatatgatacaattaaaacattagctaagaggcatgcctttagtaaattatagtttaaactataatatccgaaatcattagcttatttaagtggaagatttttgttcctgttaacctaaaaccttataaacctaaactatgttaagtaccagctattccaatgtatcaaactttcagggttttttgtttgtttgttttaatagttgttctctccacgattgtgtcaataaagatgatttaaattt

SEQ ID NO: 224 - DNA, 1885 bp, Mus musculus
  modified_base (1871)..(1871): a, c, g, t, unknown, or other
gcccttcctgtgcccatgggtgattgttctttctgtgacgactgagagtaaggttgagtcttggttctctctcatcatgcctttcaccacagtcatcttttttgtcatgatcctggatttctatatggattctgtttgttcagtcaaaatggacgtgtccaaatgtgcccgctatgggtcctttcccatttttattagtgccctcctgtttggaaatttctggacacacccaataacagaccaactccgggctatgaacagagcagcacaccaggagagcacagagcacgtcctgtctggaggagtggtagtgagcgctgtgttcttcattttgtcggccaacattccatcatctccctctaagagaggacagaaaggtacccttattggatattctcctgaaggaacaccactctatcacttcatgggggacgcttttcagcacagctctcagtcggtgcctaggttcattaaggactcactaaagcaggttctcgaggagagcgactctaggcagatcttttacttcttgtgcttgaatctgctttttacctttgtggagttgttctatggcgcgctaaccaacagtctaggcctgatctcagatggatttcacatgctctttgactgctcggctttggtcatgggactgtttgctgccctgatgagccgctggaaagccacccggattttctcctatgggtatggccgaatagagattctctccggctttattaatgggctttttctgatcgtgatagcattttttgtgtttatggaatcagtggctagactgatcgatcctccggaactagacacaaacatgctgacaccagtttccgtcggagggctgatagtaaaccttattggtatctgtgccttcagccacgcccacagccatggccatggcgcttctcaaggaaactgccactctgatcacggccattcacaccatgcacatggacacggccatgatcacggtcacagccacggcttctcgggtggaggcatgaatgcgaacatgaggggtgtatttctccatgtgttggcagacacactgggcagcatcggcgtgattgtgtccacagttctcatagagcagtttggatggttcattgctgatcccctgtgttctctttttattgctgtgttgatatttctcagtgtgatcccactgattaaagatgcctgtcaagttctacttctgagactaccacctgaccatgaaaaagaactgcatattgctttagaaaagatacagaaaattgagggattaatatcataccgagaccctcatttttggcgccattctgccagtattgtagcgggaacaattcatatacaagtgacatctgaggtgctggagcagagaattgtacagcaggttacagggatacttaaagatgcaggagtaaacaacctaaccatacaagtggaaaaggaggcatactttcagcatatgtccggcctgagtactggatttcatgatgttctggctatgacgaagcagatggaatccctgaaatactgcaaagatggcacttacatcatgtgagacgcagccctgcggcatgaacagtgaacagcggaggtcggatgaggtgataatgtcagagcagagtgaaggttgcacataattgtacgaaaactttttaagctccctactgttagattaaggagtctgttttaaaagaaaattgagatgcagaatgaagcactcattgaataagaaaattgtcgctctgtttgaattatgtgcttgaaaggaatcttgcattggaatgaacatgatgtaaccgtacacatcatcttcaggaatggacgcataatgatggattctggtgaagaccaaaatttcttctgtgcatttnctctcagtaagggc

SEQ ID NO: 225 - DNA, 724 bp, Mus musculus
ggaggttcctgtgtttggaaatccgaagatgcctgagcctgcgaagtccgctcccgccccgaagaagggctccaagaaggccgtgaccaaggcccagaagaaggacggcaagaagcgcaagcgccagccgcaaggagagctactcggtgtacgtgtacaaggtgctgaagcaagtgcaccccgacaccggcatctcctccaaggccatgggcatcatgaactcgttcgtgaacgacatcttcgagcgcatcgcgggcgaggcgtcccgcctggcgcattacaacaagcgctcgaccatcacgtcccgggagatccagacggccgtgcgcctgctgctgcccggggagctggccaagcacgcggtgtcggagggcaccaaggccgtcaccaagtacaccagctccaagtgatcctgccaagaggagcagacctgacatcgtttgtaccactcaacagtgctggatgctgtaacctcaagacagtgcgaatgggtgatactagcagattaaccaccatagtttcagaactcaaggaacaactgagaagcaccattttaaattctataaaaatgttcactgtagaaatttgtgataagaaagacacacagatgtagaaaatgagaatacttgctgcaaaattaagatgctcctagcaaaagaatgcttttaagtgtttgtcatgtatggatatatatgatgtatatataataaatgtcatgtaaagc

SEQ ID NO: 226 - DNA, 703 bp, Mus musculus
tggggccacggccgaagtgaaacgctcggctggtcggccttgctctcgatatcgacccccgcaaactttactccttaataatcggctacgtccgtttcgttgtcggtatcggtcttcagcaaccatgctggaacacctgagttcgctgcccacccagatggattacaaggggcagaaactagctgaacagatgtttcagggggtcattcttttttctgcaatagttgggtttatctacgggtacgtggctgaacagtttgggtggactgtctacatagttatggccggatttgctttctcctgtttgctgacacttcctccatggcctatctaccgccgccatcccctaaagtggttacctgttcaagacttaggcacagaagacaagaaatcaggggacagaaaaattaagaggcatgctaaaaataactgattgggactttcatgattcagcacctgcttttgtttcctgtgagatgagctgaattgctttcataagcaaaacatgagcttaaaccgcctatgttcttatagcacagctgtgtcgagatctaattgtcatggcttcatttctaatccaaatgtattttaagttatgactattttataccatctcttcataagcttgttatggagaacaggagatacaagtatgcaatgcttctttcccgtgtgtataatgactaaacacttcataacttgc

SEQ ID NO: 227 - DNA, 4727 bp, Mus musculus
accgggctgaacacccatcccgagagtcaggagggcaggtttccaagcgcagttccgccactcgcctacaccaacgggctccggaaccgaagtccacgctcgatctcagcactgggaaagtgaggcgagcaactgactatcatcatgccggcccacatgctccaagagatctccagttcttacacgaccaccaccaccatcactgcacctccctccggaaatgaacgagagaaggtgaagacagtgcccctccacctggaagaagacatccgtcctgaaatgaaagaagatattcacgaccccacctatcaggatgaggagggacccccgcccaagctggagtacgtctggaggaacatcattctcatggtcctgctgcacttgggaggcctgtacgggatcatactggttccctcctgcaagctctacacctgcctcttcgggattttctactacatgaccagcgctctgggcatcacagccggggctcatcgcctctggagccacagaacttacaaggctcggctgcccctgcggatcttccttatcattgccaacaccatggcgttccagaatgacgtgtacgaatgggcccgagatcaccgcgcccaccacaagttctcagaaacacacgccgaccctcacaattcccgccgtggcttcttcttctctcacgtgggttggctgcttgtgcgcaaacacccggctgtcaaagagaagggcggaaaactggacatgtctgacctgaaagccgagaagctggtgatgttccagaggaggtactacaagcccggcctcctgctgatgtgcttcatcctgcccacgctggtgccctggtactgctggggcgagacttttgtaaacagcctgttcgttagcaccttcttgcgatacactctggtgctcaacgccacctggctggtgaacagtgccgcgcatctctatggatatcgcccctacgacaagaacattcaatcccgggagaatatcctggtttccctgggtgccgtgggcgagggcttccacaactaccaccacaccttccccttcgactactctgccagtgagtaccgctggcacatcaacttcaccacgttcttcatcgactgcatggctgccctgggcctggcttacgaccggaagaaagtttctaaggctactgtcttagccaggattaagagaactggagacgggagtcacaagagtagctgagctttgggcttctgagttcctgtttcaaacgttttctggcagagatttaatattctgttgattaactaacaactggatattgctatcggggtgttaatgatgcatttaacctattccggtacagtattcttataaaatgagaaagctttgatcacgttttgaggtaataaatattttatttagctaggattaaccatgccacaagacattatatatttctaagcacacatgataaatgcatatacaattttgcacaacagctttaaataataacaataaatttgaacattctatacagagaggatcaaagccaaggaacatgctgttttgatgctagggtgagcatggtgctcagtccctgtttgtttgcatggtgtccagctttgtttcttctctgtcatcaccaccttcaggcaaatagttgaccaaccactggcctgtgtctgtccaccctccaaagcccaggccacctttctgttttctgaaatactgatccttcctcctgaatacatccctccttgttcctagcttcaagactgctgcctcaaactagggatagagcaagtccccgctgatgaagttcactgcaggttgtgctagatgggatggagaaattatcttcatttgatacagagcaagtagattgtctcgagagaaaagttagcatgcgtggtatgatttgtaagtaaagatggaagagagagagagagagagagagagagagagagagagagagagagaggtagccatatctaacagcctacttaccaaagaccccaggcctctctgcttggcatgcctcctttctgtccatcctctgaaccccagagattagtgagatttgaataattaaatcattttcagagtgaagggggttaatgcagggtctgtgctaggggagggttttagcttttggtaactgaagattttttcatggaaaaagtcttcgtgttcaatgtgcctagaactgataactaaacagctgacatttgtcggggacagatatggtgtgaaactatgaaaatataagcaaaatcttcacttggaacatgaaactatttcacttagaaaataatcgaaggacccgaggtgttgcctgggttgccagtttctttcgtggctgggcaggaactagtgaggttgaggggcagtgtctgtaagtagctgctaagaggtgcatttccagatgaagcccttggggaacatctgccagggatccgcatggtgttggctccatccattgctttagtttcctccttggattgtgtagaaacttggcttcccatggttttgaaccttccatgccttctttgctttgtggccacccagcctgcctagtgctgcctaggaagctcttacccacctgatttcttctgacatttctttctttggcctttttttctttctccggacatgcagctagttgcctgagtgtatcaagagcacccaggacttgctgctgtccaggcctgttcctcccccagtatccgtgggtgtggaagagctgtgtagcttcaggaagcagagccaggtgccacctttctgtggcttccagatcctccctacctccaactcatgtgcctctgtcacagtgatttcaggaaagcttggtagaccctctagcaacatctcggttcagaaagtctctctggtttgtgagttaacagctcagctaagtgctgttttgtctcagtgagttaaccactgaatgcgagggttggttgttgatctgtctcggtgtgtgtcggagtagacagcatatgcacttctccctgtgcgctttgcaaggtaatgtggctttggctgatccatgcaggcaggtagtggtacagtgctgctgaaaggaagaagttccccattttatctgttaaaacaccagagacatgggcaagtgctaatggacctcacttcaggaagagggtctgcttcctgaagccagtgtgtgatgaaaagtgactgagacctgatatctaaggtgagacctgatacctaacactctgtcacacagtccagggccaacagtgctataggaaagtctagaagaaaacatcacatcagtattttagaaccatcaaccatctcttgtccctatagcccaatccagaggcctggtttttagaactggctgtgtaaggtgccaaacactcagttcacttgtagaatcagagccttttttcccccctatgttaattgaacacgcgctctgagctgttttgttgaagtagaaaatctcatagaaaaatcactgtagatctactgacctatagccctctggaaatgcttttgagatggttttacttttctaggtcatagatgcctgatttataagatgaacaataaaatcagctttctttctttctcttctgatcttattccccagatctgattcaggccatgttccaaagcaaggctacattgaggtcctggtgtctttaagtaaaggacatctttcagatcctctcaaagaaggatttataacagtttccagatgaatgtactaatagctttgggtgccttatctctttcctaatctgtagtgcctgtgagctcagtctcactccttcccttagcccggagaccccttagatcgagtgggaatagtcaagaggctggctggagagtcatcagtacattggtttgcagaaatcttttacaggctacattttggaatttttttttttttagtaagtgatcaaatttggtgggaagtaattcgagtgtattcgattgtattgtcgtcctcgttatcattgtcaaacatgttatagacggcagttggcactggggctgctaatctctgggtgtagtctctgaaactgtagctccagtgaggtggtgtgaaaggttagcaaagccaccatctgctggtggctccagccaaggtgcctcttagccactgaattgctatgttatcctttctcttgtaacaaacccaccccagagataaagcctttaatcaacccaagaaactcctgggctaagtatctgacagtctcacatctcaacagtgtgaattaagtgtccatagcatcagctcaggaggacactctgggagagtgctgacaaaaaagggttattaatactgacctactacttcaagggcagttctgaggtgattagagctttttttaaaaaccaagtatttggggatcctcagcagaggtattcatacagactcccaaagaactatatatgttcctgagaccatcgtttagtctacattgctcttcccagagactgacagatatgaccagtcaaagtgcaagactacctacccactgccatgaaaaccattgcaggaaacctttcccttccctgaatgagattttttttttccctttttatgtggggtaattatttgtgacccaagtgtaatttggatgatttccattaatatcaactcttgaagcctacttgtactgattgagattgtatttgttcctaataaaagtggatctggttgtactgtcaaaaaaaaaaaaaaaaaaaaaaaaaaaaaaaaaaaaaaaaaaaaa

SEQ ID NO: 228 - DNA, 2878 bp, Mus musculus
  modified_base (2097)..(2097): a, c, g, t, unknown, or other
gagagcgcaagcgcgggctgcggcgggccaagatggcggcagcggcggcggcggcggcagcgaccgagcagcaagggtccaacgggccagtgaagaaatccatgcgggagaaggctgtggagcggaggaatgttaacaaagagcacaacagcaatttcaaagctggatatatccccatcgatgaggaccggctccataagactgggctgagggggcgaaagggcaacttagccatctgcgtgatcgtcctcctgtttatcctggccgtcatcaatctactcattacacttgtcatctgggcggtgatccgcattgggccaaatgggtgtgatagcatggagttccacgagagcggtctgctgaggttcaagcaagtgtctgacatgggcgtcatccacccgctttataagagcacggtgggaggacggcggaatgaaaacctggtcatcactggcaacaaccagccaattgtcttccagcaagggacgaccaagctgagtgttgaaaagaacaagacctccatcaccagcgacatcgggatgcagttttttgacccaaggacacacaatatcctgttcagcacggactatgagacgcacgagtttcatctgccaagtggggtgaaaagtttgaacgttcagaaagcatcgactgaaaggattaccagcaatgctaccagtgacttaaacatcaaagtcgatgggcgtgcaattgtgcgaggcaacgaaggcgtcttcatcatgggcaaaaccattgaatttcacatgggaggagatgtggagttaaaagctgaaaacagcatcatcctcaacggcacggtgatggtcagccctacgcgcctgcccagttcctccagcggggaccagtcagggagtggtgactgggtgcgctacaagctctgcatgtgtgcagatggcacactcttcaaagtacaagtaacaggtcacaacatgggctgccaggtctcagacaacccttgtgggaacactcattagacggtgcatccgcagggctcagcgcgctcagatctgacttgaccttcccctttttaagaatgcatgtgaaccatgtttgtacagcgtttgccataacttgtaattattttacctggggagcaccactgtgtctattatgtactctccatatttaagggatcttgagtgcctacattctaatacattttagtaagttgcactgatactcaacagttctctaaaacaatgatgagaaattaataaaataaaattaatctttgaagtgtttttaacattctactatatcttgtcctagaggacaaagggctgaagtggttgagacactccatcagtaagccttggtcattctaagggagagatccactagagatgtttggagagacagggacactgtgctctgtctttggtttttaaaagggaaggcacagatttttaatgcattaacccaaagctacattttcacaaacaagtcattaaggagctttccatatataagcttgtaagaaactatgtttccttagttttgcactaaagaaaatactgtcatggtatgtttacttgaaataatgatacatgtatttacggtgtgtggacgttaaacgcaatcacagttctcactctcgtgagcaacagaagccatcatcatcaggcctcttcttgctgagcactgtcctgggtgcgatacacttgatctctctgactcccactgcacctctctaagcaagggcttcgatcccagctttacccatcaggaaactgaaggtcagcgaggttcaggatgctgccccatactatacagggttgggagtcaagtacaattccaacccaggtaaacctgattccaaatgtgtttctgccttttttactatctacactgaattttcaactatttaaaactctcaaagaatgggaaaaaccttatcctaattcacctaacaggtaaaaaaaacaagcatgtgtgctactctagttaaaatgccaatgctagaaaaacatgaccaatcactgtcagactttaaactctcttgagccagttctaagatgtcattcaatagacagaccagcttggtctgcttgtcatgtgggagtacctgaatgagtnatagagaagctggcatacttttccctaaacccaggggaagctcagtggaaaggggggaagctaggcctcagtaggtcctgctgtccagaggttgttcctcctgtgtcccataccagcatcaccctttagaagaattctgtgtgtgcctagaaattaatatacacgagaataaagggtgctaactggaaagatgacgcaggtcattttagccaggtataaaaccttgatctctgctcctcacctcagtctcattttaattaattacagccctcaagccagttgattcttagtacagtttatacttgatttaaaaggaatttcttggtattactaagaaacatgggattggggatgaagaataatgcatagctccaaagcagacagtagggaggcaccatgggcctagctacagagaaggatgttggtactctgtcatggtcacttagaactgtgtgggtaaaaaatgagcacataaaacaattcgtgttcactgttgtcacaattctgtcaaatgaaaaaatgaaataccttatagactgtgaactcaggctaaggtgagagttgactggagaccagacactaagtgcagattttagatgtaaagaaagagagcaatttatacctctggatatattcaagtattgtttaataactaaataatgctcagaaaaatcacgcttggaattctcatgtccatgctcagtgtatttttaaattgtacatttgtttcatgttctatttaaatttgttttgagaatttctttaaataaatatttttacc

SEQ ID NO: 229 - DNA, 2504 bp, Mus musculus
cggaaggatgtaggagctgaacttgagtggtgggctgtggactctgggatgctgctgctgctgctgctgctgctagtggctgcggcccaggcagtggccctggctccgcgccgcttcactccggactggcagagcttggactcgcggccactgccgagctggttcgatgaggccaagttcggggtgttcgtgcactggggggtgttctcggtgcccgcctggggcagtgaatggttctggtggcactggcagggcgatcggatgccggcctaccagcgcttcatgacagaaaactacccgcccggcttcagctacgccgacttcgcaccgcagttcacagcgcgcttcttccacccggatcagtgggccgaactctttcaggctgccggggccaagtacgtcgtcctgaccacaaagcatcatgaaggcttcacaaactggccaagccctgtgtcttggaactggaactcgaaggacgtggggccccaccgtgatttggtcggtgagttgggagcagctgtgcggaagaggaacatacgctacggcctctaccactcgctcttggaatggttccatccactctacctacttgataagaaaaatggcttcaaaactcagcatttcgtcagggcaaaaacaatgccagagctgtatgaccttgttaacagctacaagcctgacctgatctggtccgacggggagtgggagtgtcctgacacgtactggaactccaccagcttccttgcttggctctacaacgatagccctgtcaaggatgaggtgatagtgaatgaccggtggggccagaactgctcctgtcatcatggagggtactacaactgtcaagacaaatacaagccacagagcttgccagaccacaagtgggagatgtgcaccagcatggacagagcatcctggggctatcgaaaagacatgaccatgtcgaccatcgccaaggaaaatgaaatcatcgaggaattggttcagacggtaagtttgggaggcaactatcttctcaacattggaccaactaaagatggtctgatcgtccccatcttccaagaaaggcttcttgctgtcggcaagtggctgcagatcaacggggaggccatctatgcctccaaaccctggagggtgcagtcggaaaagaacaagacggttgtgtggtacactactaaaaacacaactgtttacgccactttcctgtactggccagaaaatgggatcgtcaacctcaaatcccccaaaacgacctcggccacaaagataacaatgctaggactagaaggagacctgagctggacccaggatccactggagggcgtcctcatctctctgccacagttgccacctaccgttctgccggtggagtttgcgtggactctgaagctgacaaaggtgaactgatcaaaggagctcaaggacagactgcctggggcgctgcttaccatccctgcaataaagtagcttcccttccttccacccagtggtcaatctcccaagccgttctaatggatgggcgagccattgctagcatttctggtgggcagagagacctggccagctcagctgagtcacccatgcctccactagggtggaacttccctctcttctctgatgacctacctgataatgagccaagtcatcctcttgcctgtgggagcaggtcagagaggtctggcgagctcaaccccctctgccttattggttggtaccagtcccgcagagatggaccaggtcctgccctccgggcttgccaggctgtcatgccaagcaagccaaacgctctgccactgagcacgtcttcagagatatcccgtccctcaggattcagttattcgtgggtgccagggggaccgcagacctgtaaggatatgggattggaagagaaaagagaagcagatgaccaagtagattgtacctatcaaggtctccatttattatgctgaggtgccttgttttatagcatacattgcagggaatggggaggggccgagggggaattttaacaaagaacaaaaaagtgggcatctgctcacatgaggtccgaagtcaggctccaggcggcgggcactctgcatcttatagatctatgcggaacatagatcctccttgacagccttggggtgtcaggccgggctcaggcgtaactcatgtccttggatggcttgggagtcaggaagagacagggaagaggggactataatttagcttttacaacctcaggtgccaggaagggaatagggaggagggagttataaccagctcctagcatgaggccatttggcctgtcagggagattgtgaagggctcgctttctcacgggatggtctctgacacagagataccaatgaaagaaggcgatgctgccttgccttaaaaaaaaaaaaaaaaaaaaaaaaaagatggaagtaaatttgtatgccaaattatttctaccacaagcatgtgataggtttctttccctaacttaggttacagctttatactcattttctggttcc

SEQ ID NO: 230 - DNA, 1840 bp, Mus musculus
gcttccccattcaccgtagtagtgaggcctagtcacgagccatggagtgcgctcccccggcggccggcttcctgtactgggtgggcgcgagcaccattgcctacctggccctgcgagcctcgtactcgctcttcagggccttccaggtgtggtgcgtgggcaacgaggccttggtcggtccgcgactcggagaatgggcagttgttacaggtggcactgatggaattggaaaagcatatgcagaagagttagcaaaacgtggaatgaagattgtcctgatcagcaggtcccaagataaactgaatcaggtttccaacaacatcaaagaaaaattcaacgttgaaacaaggaccattgctgtcgacttttcattggatgatatttatgataaaattaagacaggcctgtctggtcttgagattggcgttttagtgaacaacgtgggcatgtcatacgagtatccggaatactttctggaaattcccgacttggacaacaccatcaagaaactgataaatattaatgtgctttccgtttgcaaggtgacacgcttggtgctgcctggcatggtagaaagatctaaaggggtgattctcaacatctcctcagccagtggcatgctcccagttccattgttgacaatctactctgcaaccaaggcctttgtagatttcttctctcagtgcctccatgaggagtataagagcaagggcatctttgtgcagagtgtcatgccataccttgtagctacaaaactggcaaaaatacagaagccgactttggataagccctctgcagagacatttgtgaagtctgcaattaaaacagtaggtttgcagacccgaaccactggatatgtgatccactctctcatgggctcaataaactcaatcatgcctcgttggatgtattttaaaataatcatgggtttcagcaagtctttgcggaatcgctacctgaagaaaaggaagaagaactaagtgctgctgagttattgggccccttggccaggtgtttgacctgtgcctatacactgggcacctgcctgtccccagagtcttcactgttgtctcagtaattactaacatggcatagttggcagaaaacaaattccttttagaggctcctaacatatattctggatacaaccaggagtaatttgaagtttaatgtaaatgttcttggcaaatgtatgttcctttgacaaaaaggaacaaatcccagaatgacagcggtagacacagacccatctggcccacagtgccaatgaccacattatatttggtctggaagctactataaagtgcattttttattttagcattagagggaacagggctcgattaatttgttatgggcagattcagtgtagtttacatcgagttctgtgagcttttctaagtgtatgtcccagcttcgtatttatgtggcactggtcttctcaaaggtggctaagacataaaaagagaattgaaacatggagttctttctaacacgtaagtccacaaaatgttattcttggaccacacatcatgtctgctctgttcaaatgtatgtaaatactgaatgctatatagtgtgcccggaatgtagaggtaagtgggccaaagtgtacatcaagaccaacaacatcctgtggtaccgcaggatccaggaaagcagcctgtgtggacacacagcattcgttgtgtctgcactgcacccggatacttgcctaggatggcagactccttctggggtgggtggtggggtcatggaaacatgttctttctaagatggtgtctcatatttagaattcatatatctgcttttaataaaagatgatgtaactgtggtgtcg

SEQ ID NO: 231 - DNA, 2066 bp, Mus musculus
cgggttgttgggggagcggccggctgagtagcgggtgtagaaccgtgcgtgaggccaccgtctcttcttcgccaccatgggggcccagctgagcacgttgagccacgtggtgctctcgcccgtctggttcatctacagtctcttcatgaagctgtttcagcgctccacaccggccatcaccctcgagaaccccgacatcaagtaccctctgaggctcatcgacaaggaggtcatcagtcctgacactcggcgcttccgatttgccctcccttcaccccagcacatcctgggccttcctattggccaacacatctacctctcgactaggatcgatggcaacttggtcattcggccctacacccctgtgtcgagcgatgatgacaagggctttgtggacttggtggtcaaggtttacttcaaggacacccatcccaagtttccagctggagggaaaatgtctcagtacctggaaaacatgaagattggagacaccattgaattccggggtcccaatgggctactggtctaccagggcaaagggaagtttgccatccgtgcagacaagaagtccaaccccgttgtcaggacggtgaagtctgtaggcatgattgcaggagggacaggcatcaccccaatgctgcaggtgatccgagccgtcctgaaggacccaaacgaccacaccgtgtgctatctgctctttgccaaccagtccgagaaagatatcctgttgcggcctgagctggaggaactgaggaacgaacattctgctcgcttcaagctctggtacacagtggacaaagcccctgatgcctgggactatagccagggcttcgtgaatgaggagatgatcagggaccaccttccaactcctggggaggagccgctgatactgatgtgtggacccccaccaatgatccagtttgcctgtttgccaaacctggagcgtgtgggccatcccaaggagcgatgcttcaccttctgatggctggacgctggccaagcctgtgcctgctgctcacgcactcaccacaaccacctgtccaccccttccttccccaccactgtcgctcaccctgacatatgcccacatccatgctggggcctgggttcagcctggcctgcccagccctggtcatccagctgtactggcccctggggggcccctttgggagcaggcctgtgtatcaggtgacttctgttgaccactctctgaataggcttctgtctggtactaactggccattaccagagatgtcctgtgactacccccttacacatagacacacacacacacacacacacacacacagagacaggagagagagagagagagagagagagagaggagagagaggagagagagagaggagagagagacaggagagagagagaggagagagaagaggaagagagagagagagagagggagagagaggagagagagaggagagagagagagaagaggaagagagagggagggagagcgtgagcgtgagctgtcagtaccatgtctacccattgccatgaactgtggtctatagaaaggaagtgaaaggtaaatagtcacctacggtcctaggaaccatgcctgccacctaaccacctacctgccttaggccatagcctggcctgtgcccctaaacactacattagacagtgacacccaaaggttttcttaggagggtgtctggcagagacaggccagcccccacttgctggccaggggtcccttggggcagcacgtggacccttccaaaactatacacactgcccccgactccatgcagtcttgagtgccctaagttgtcagcccaacagagtttggtagaccttgggggtccctggcttatctctccaccccaaacctccttcctgtctggtccccagcctgggggggttctgagcagtgcctcttgtcttggagacagacctggtgcctggcgctgccttcagcaggcagcaggcagcctcctgcacactggcttttttagtcatttatgggcaaaaagagttaaagtaaaactttgcaaaaaaaaaaaaaaaaaaaaaaaaaaaaaaaaaaaaaa

SEQ ID NO: 232 - DNA, 800 bp, Mus musculus
gatcacgtgagcctctgttgacacttccgggtgggacgagagcgaggctccggaccgattcggctgctggggcgcaggcatggcataccacggccttactgtgcctttgatcgtgatgagcgtgttctggggcttcgtgggcctcctcgtgccctggtttatccccaagggtcctaaccggggagttatcatcaccatgttggtgacttgttcagtttgctgctatctcttttggctgattgcaattctggcacagctcaatcctctgtttggaccacagttgaaaaatgaaaccatctggtatctgaagtaccactggccttgaggatgaagacgcgctgcacagtgcctaggcactgaggtcgcagacagaagccttctgtgcagaatcacctgcacatcagaccttcctccatagcccacttcgggcgttacctgccttacacttgaagatcttcctctgcatacagtattttttcccttcaccttttttacactctgaattatgtgcctgcgtagctgcctctgagatgtgtctgcactccactgtttcgggaaatgtgttactcttatcttgaagcctgtggctttgaatatggctcttgccagctcacaacatgagagtcagcgatgtgtttaagaattgctgcgagacaaacaagactcggcgggacagtcaggagtgcctgctcaagaggagccctaccccagcagatgtacaccaagctctattttcaggatgaatttcttacttctacatctttgggaataaattatttttcttctttctatggaaaaaa

SEQ ID NO: 233 - DNA, 13815 bp, Mus musculus
cctcactcacttgccccttacaggactcagctcttgaaggcaatagctttatagaaaaaacgaataggaagacttgaagtgctatttttttttttttttttgtcaaggctgctgaagtttattggcttctcatcgtacctaagcctcctggagcaataaaactgggagaaacttttaccaagatttttatccctgccttgatatatactttttcttccaaatgctttggtgggaagaagtagaggactgttatgaaagagaagatgttcaaaagaaaacattcacaaaatggataaatgcacaattttctaagtttggaaagcaacacatagacaacctcttcagtgacctgcaggatggaaaacgcctcctagacctcttggaaggccttacagggcaaaaactgccaaaagaaaagggatctacaagagttcatgccctgaacaatgtcaacaaggcactgcgggtcttacagaaaaataatgttgatttagtgaatataggaagcactgacatagtggatggaaatcataaactcactcttggtttgatttggaatataatcctccactggcaggtcaaaaatgtgatgaaaactatcatggctggattgcagcaaaccaacagtgaaaagattcttctgagctgggttcgacagtcaacacgtaattatccacaggttaacgtcatcaacttcacctctagctggtccgacgggttggctttgaatgctcttatccatagtcacaggcccgacctgtttgattggaatagtgtggtttcacagcactcagccacccaaagactggaacatgccttcaacattgcaaaatgccagttaggcatagaaaaacttcttgatcctgaagatgttgctaccacttatccagacaagaagtccatcttaatgtacatcacatcactctttcaagttttgccacaacaagtgagcattgaagccattcaagaagtggaaatgttgcccaggacatcttcaaaagtaactagagaagaacattttcaattacatcaccagatgcattactctcaacagatcacagtcagtctagcacagggctatgaacaaacttcttcatctcctaagcctcgattcaagagttatgccttcacacaggctgcttatgttgccacctctgattccacacagagcccctatccttcacagcatttggaagctcccagagacaagtcacttgacagttcattgatggagacggaagtaaatctggatagttaccaaactgctttagaagaagtactttcatggcttctttctgccgaggatacattgcgagcacaaggagagatttcaaatgatgttgaagaagtgaaagaacagtttcatgctcatgagggattcatgatggatctgacatctcatcaaggacttgttggtaatgttctacagttaggaagtcaactagttggaaaagggaaattatcagaagatgaagaagctgaagtgcaagaacaaatgaatctcctaaattcaagatgggaatgtctcagggtagctagcatggaaaaacaaagcaaattacacaaagttctaatggatctccagaatcagaaattaaaagaactagatgactggttaacaaaaactgaagagagaactaagaaaatggaggaagagccctttggacctgatcttgaagatctaaaatgccaagtacaacaacataaggtgcttcaagaagatctagaacaggagcaggtcagggtcaactcgctcactcacatggtagtagtggttgatgaatccagcggtgatcatgcaacagctgctttggaagaacaacttaaggtactgggagatcgatgggcaaatatctgcagatggactgaagaccgctggattgttttacaagatattcttctaaaatggcagcattttactgaagaacagtgcctttttagtacatggctttcagaaaaagaagatgcaatgaagaacattcagacaagtggctttaaagatcaaaatgaaatgatgtcaagtcttcacaaaatatctactttaaaaatagatctagaaaagaaaaagccaaccatggaaaaactaagttcactcaatcaagatctactttcggcactgaaaaataagtcagtgactcaaaagatggaaatctggatggaaaactttgcacaacgttgggacaatttaacccaaaaacttgaaaagagttcagcacaaatttcacaggctgtcaccaccactcaaccatccctaacacagacaactgtaatggaaacggtaactatggtgaccacaagggaacaaatcatggtaaaacatgcccaagaggaacttccaccaccacctcctcaaaagaagaggcagataactgtggattctgaactcaggaaaaggttggatgtcgatataactgaacttcacagttggattactcgttcagaagctgtattacagagttctgaatttgcagtctatcgaaaagaaggcaacatctcagacttgcaagaaaaagtcaatgccatagcacgagaaaaagcagagaagttcagaaaactgcaagatgccagcagatcagctcaggccctggtggaacagatggcaaatgagggtgttaatgctgaaagtatcagacaagcttcagaacaactgaacagccggtggacagaattctgccaattgctgagtgagagagttaactggctagagtatcaaaccaacatcattaccttttataatcagctacaacaattggaacagatgacaactactgccgaaaacttgttgaaaacccagtctaccaccctatcagagccaacagcaattaaaagccagttaaaaatttgtaaggatgaagtcaacagattgtcagctcttcagcctcaaattgagcaattaaaaattcagagtctacaactgaaagaaaagggacaggggccaatgtttctggatgcagactttgtggcctttactaatcattttaaccacatctttgatggtgtgagggccaaagagaaagagctacagacaatttttgacactttaccaccaatgcgctatcaggagacaatgagtagcatcaggacgtggatccagcagtcagaaagcaaactctctgtaccttatcttagtgttactgaatatgaaataatggaggagagactcgggaaattacaggctctgcaaagttctttgaaagagcaacaaaatggcttcaactatctgagtgacactgtgaaggagatggccaagaaagcaccttcagaaatatgccagaaatatctgtcagaatttgaagagattgaggggcactggaagaaactttcctcccagttggtggaaagctgccaaaagctagaagaacatatgaataaacttcgaaaatttcagaatcacataaaaaccttacagaaatggatggctgaagttgatgttttcctgaaagaggaatggcctgccctgggggatgctgaaatcctgaaaaaacagctcaaacaatgcagacttttagttggtgatattcaaacaattcagcccagtttaaatagtgttaatgaaggtgggcagaagataaagagtgaagctgaacttgagtttgcatccagactggagacagaacttagagagcttaacactcagtgggatcacatatgccgccaggtctacaccagaaaggaagccttaaaggcaggtttggataaaaccgtaagcctccaaaaagatctatcagagatgcatgagtggatgacacaagctgaagaagaatatctagagagagattttgaatataaaactccagatgaattacagactgctgttgaagaaatgaagagagctaaagaagaggcactacaaaaagaaactaaagtgaaactccttactgagactgtaaatagtgtaatagctcacgctccaccctcagcacaagaggccttaaaaaaggaacttgaaactctgaccaccaactaccaatggctgtgcaccaggctgaatggaaaatgcaaaactttggaagaagtttgggcatgttggcatgagttattgtcatatttagagaaagcaaacaagtggctcaatgaagtagaattgaaacttaaaaccatggaaaatgttcctgcaggacctgaggaaatcactgaagtgctagaatctcttgaaaatctgatgcatcattcagaggagaacccaaatcagattcgtctattggcacagactcttacagatggaggagtcatggatgaactgatcaatgaggagcttgagacgtttaattctcgttggagggaactacatgaagaggctgtgaggaaacaaaagttgcttgaacagagtatccagtctgcccaggaaattgaaaagtccttgcacttaattcaggagtcgcttgaattcattgacaagcagttggcagcttatatcactgacaaggtggatgcagctcaaatgcctcaggaagcccagaaaatccaatcagatttgacaagtcatgagataagtttagaagaaatgaagaaacataaccaggggaaggatgccaaccaaagggttctttcacaaattgatgttgcacagaaaaaattacaagatgtctccatgaaatttcgattattccaaaaaccagccaattttgaacaacgtctagaggaaagtaagatgattttagatgaagtcaagatgcatttgcctgcattggaaaccaagagtgttgaacaggaagtaattcagtcacaactaagtcattgtgtgaacttgtataaaagcctgagtgaagtcaagtctgaagtggaaatggtgattaaaaccggacgtcaaattgtacagaaaaagcagacagaaaatcccaaagagcttgatgaacgagtaacagctttgaaattgcattacaatgagttgggtgcgaaggtaacagagagaaagcaacagttggagaaatgcttgaagttgtcccgtaagatgagaaaggaaatgaatgtcttaacagaatggctggcagcaacagatacagaattgacgaagagatcagcagttgaaggaatgccaagtaatttggattctgaagttgcctggggaaaggctactcaaaaagagattgagaaacagaaggctcacttgaagagtgttacagaattaggagagtctttgaaaatggtgttgggcaagaaagaaaccttggtagaagataaactgagtcttctgaacagtaactggatagctgtcacctccagagtagaagaatggctaaatcttttgttggaataccagaaacacatggaaacctttgatcagaacatagaacaaatcacaaagtggatcattcatgcagatgaacttttagatgagtctgaaaagaagaaaccacaacaaaaggaagacattcttaagcgtttaaaggctgaaatgaatgacatgcgcccaaaggtggactccacacgtgaccaagcagcaaaattgatggcaaaccgcggtgaccactgcaggaaagtagtagagccccaaatctctgagctcaaccgtcgatttgcagctatttctcacagaattaagactggaaaggcctccattcctttgaaggaattggagcagtttaactcagatatacaaaaattgcttgaaccactggaggctgaaattcagcagggggtgaatctgaaagaggaagacttcaataaagatatgagtgaagacaatgagggtactgtaaatgaattgttgcaaagaggagacaacttacaacaaagaatcacagatgagagaaagcgagaggaaataaagataaaacagcagctgttacagacaaaacataatgctctcaaggatttgaggtctcaaagaagaaaaaaggccctagaaatttctcaccagtggtatcagtacaagaggcaggctgatgatctcctgaaatgcttggatgaaattgaaaaaaaattagccagcctacctgaacccagagatgaaagaaaattaaaggaaattgatcgtgaattgcagaagaagaaagaggagctgaatgcagtgcgcaggcaagctgagggcttgtctgagaatggggccgcaatggcagtggagccaactcagatccagctcagcaagcgctggcggcaaattgagagcaattttgctcagtttcgaagactcaactttgcacaaattcacactctccatgaagaaactatggtagtgacgactgaagatatgcctttggatgtttcttatgtgccttctacttatttgaccgagatcagtcatatcttacaagctctttcagaagttgatcatcttctaaatactcctgaactctgtgctaaagattttgaagatctttttaagcaagaggagtctcttaagaatataaaagacaatttgcaacaaatctcaggtcggattgatattattcacaagaagaagacagcagccttgcaaagtgccacctccatggaaaaggtgaaagtacaggaagccgtggcacagatggatttccagggggaaaaacttcatagaatgtacaaggaacgacaagggcgattcgacagatcagttgaaaaatggcgacactttcattatgatatgaaggtatttaatcaatggctgaatgaagttgaacagtttttcaaaaagacacaaaatcctgaaaactgggaacatgctaaatacaaatggtatcttaaggaactccaggatggcattgggcagcgtcaagctgttgtcagaacactgaatgcaactggggaagaaataattcaacagtcttcaaaaacagatgtcaatattctacaagaaaaattaggaagcttgagtctgcggtggcacgacatctgcaaagagctggcagaaaggagaaagaggattgaagaacaaaagaatgtcttgtcagaatttcaaagagatttaaatgaatttgttttgtggctggaagaagcagataacattgctattactccacttggagatgagcagcagctaaaagaacaacttgaacaagtcaagttactggcagaagagttgcccctgcgccagggaattctaaaacaattaaatgaaacaggaggagcagtacttgtaagtgctcccataaggccagaagagcaagataaacttgaaaagaagctcaaacagacaaatctccagtggataaaggtctccagagctttacctgagaaacaaggagagcttgaggttcacttaaaagattttaggcagcttgaagagcagctggatcacctgcttctgtggctctctcctattagaaaccagttggaaatttataaccaaccaagtcaggcaggaccgtttgacataaaggagattgaagtaacagttcacggtaaacaagcggatgtggaaaggcttttgtcgaaagggcagcatttgtataaggaaaaaccaagcactcagccagtgaagaggaagttagaagatctgaggtctgagtgggaggctgtaaaccatttacttcgggagctgaggacaaagcagcctgaccgtgcccctggactgagcactactggagcctctgccagtcagactgttactctagtgacacaatctgtggttactaaggaaactgtcatctccaaactagaaatgccatcttctttgctgttggaggtacctgcactggcagacttcaaccgagcttggacagaacttacagactggctgtctctgcttgatcgagttataaaatcacagagagtgatggtgggtgatctggaagacatcaatgaaatgatcatcaaacagaaggcaacactgcaagatttggaacagagacgcccccaattggaagaactcattactgctgcccagaatttgaaaaacaaaaccagcaatcaagaagctagaacaatcattactgatcgaattgaaagaattcagattcagtgggatgaggttcaagaacagctgcagaacaggagacaacagttgaatgaaatgttaaaggattcaacacaatggctggaagctaaggaagaagccgaacaggtcataggacaggtcagaggcaagcttgactcatggaaagaaggtcctcacacagtagatgcaatccaaaagaagatcacagaaaccaagcagttggccaaagacctccgtcaacggcagataagtgtagacgtggcaaatgatttggcactgaaacttcttcgggactattctgctgatgataccagaaaagtacacatgataacagagaatatcaatacttcttggggaaacattcataaaagagtaagtgagcaagaggctgctttggaagaaactcatagattactgcagcagttccctctggacctggagaagtttctttcctggattacggaagcagaaacaactgccaatgtcctacaggacgcttcccgtaaggagaagctcctagaagactccaggggagtcagagagctgatgaaaccatggcaagatctccaaggagaaattgaaactcacacagatatctatcacaatcttgatgaaaatggccaaaaaatcctgagatccctggaaggttcggatgaagcacccctgttacaaagacgtttggataacatgaatttcaagtggagtgaacttcagaaaaagtctctcaacattaggtcccatttggaagcaagttctgaccagtggaagcgtttgcatctttctcttcaggaacttcttgtttggctacagctgaaagatgatgaactgagccgtcaggcacccatcggtggtgatttcccagcagttcagaagcagaatgatatacatagggccttcaagagggaattgaaaactaaagaacctgtaatcatgagtactctggagactgtgagaatatttctgacagagcagcctttggaaggactagagaaactctaccaggagcccagagaactgcctcctgaagaaagagctcagaatgtcactcggctcctacgaaagcaggctgaagaggtcaacgctgaatgggacaaattgaacctgcgctcagctgattggcagagaaaaatagatgaagctcttgaaagactccaggaacttcaggaagctgccgatgaactggacctcaagttgcgccaagctgaggtgatcaagggatcctggcagccagtgggggatctcctcattgactctctgcaagatcaccttgaaaaagtcaaggcacttcggggagaaattgcacctcttaaagagaatgtcaatcgtgtcaatgaccttgcacatcagctgaccacactgggcattcagctctcaccttataacctcagcactttggaagatctgaataccagatggaggcttctacaggtggctgtggaggaccgtgtcagacagctgcatgaagcccacagggactttggtcctgcatcccagcacttcctttccacttcagttcagggtccctgggagagagccatctcaccaaacaaagtgccctactatatcaaccacgagacccaaaccacttgttgggaccaccccaaaatgacagagctctaccagtctttagctgacctgaataatgtcaggttctccgcgtataggactgccatgaagctcagaaggctccagaaggccctttgcttggatctcttgagcctgtcagctgcatgtgatgccctggaccagcacaacctcaagcaaaatgaccagcccatggatatcctgcagataattaactgtttgactacaatttatgatcgtctggagcaagagcacaacaatctggtcaatgtccctctctgtgtggatatgtgtctcaactggcttctcaatgtttatgatacgggacgaacagggaggatccgtgtcctgtcttttaaaactggcatcatttctctgtgtaaagcacacttggaagacaagtacagataccttttcaagcaagtggcaagttcaactggcttttgtgaccagcgtaggctgggtcttcttctgcatgattctattcaaatcccaagacagttgggtgaagttgcttcctttgggggcagtaacattgagccgagtgtcaggagctgcttccaatttgccaataataaacctgagattgaagctgctctcttccttgactggatgcgcctggaaccccagtctatggtgtggctgcccgtcttgcacagagtggctgctgctgaaactgccaagcatcaagccaagtgtaacatctgtaaggagtgtccaatcattggattcaggtacagaagcctaaagcattttaattatgacatctgccaaagttgctttttttctggccgagttgcaaagggccataaaatgcactaccccatggtagagtattgcactccgactacatccggagaagatgttcgcgacttcgccaaggtactaaaaaacaaatttcgaaccaaaaggtattttgcgaagcatccccgaatgggctacctgccagtgcagactgtgttagagggggacaacatggaaactcccgttactctgatcaacttctggccagtagattctgcgcctgcctcgtccccccagctttcacacgatgatactcattcacgcattgaacattatgctagcaggctagcagaaatggaaaacagcaatggatcttatctaaatgatagcatctctcctaatgagagcatagatgatgaacatttgttaatccagcattactgccaaagtttgaaccaggactcccccctgagccagcctcgtagtcctgcccagatcttgatttccttagagagtgaggaaagaggggagctagagagaatcctagcagatcttgaggaagaaaacaggaatctgcaagcagaatatgatcgcctgaagcagcagcatgagcataaaggcctgtctccactgccatctcctcctgagatgatgcccacctctcctcagagtcccagggatgctgagctcattgctgaggctaagctactgcgccaacacaaaggacgcctggaagccaggatgcaaatcctggaagaccacaataaacagctggagtctcagttacatagactgagacagctcctggagcagccccaggctgaagctaaggtgaatggcaccacggtgtcctctccttccacctctctgcagaggtcagatagcagtcagcctatgctgctccgagtggttggcagtcaaacttcagaatctatgggtgaggaagatcttctgagtcctccccaggacacaagcacagggttagaagaagtgatggagcaactcaacaactccttccctagttcaagaggaagaaatgcccccggaaagccaatgagagaggacacaatgtaggaagccttttccacatggcagatgatttgggcagagcgatggagtccttagtttcagtcatgacagatgaagaaggagcagaataaatgttttacaactcctgattcccgcatggtttttataatattcgtacaacaaagaggattagacagtaagagtttacaagaaataaaatctatatttttgtgaagggtagtggtactatactgtagatttcagtagtttctaagtctgttattgttttgttaacaatggcaggttttacacgtctatgcaattgtacaaaaaagttaaaagaaaacatgtaaaatcttgatagctaaataacttgccatttctttatatggaacgcattttgggttgtttaaaaatttataacagttataaagagagattgtaaactaaagtgtgctttataaaaaaagttgtttataaaaacccctaaacaaacacacacgcacacacacacacacacacacacacacacacacacgcacacatacatgcacgaacccaccacacacacacacacacacacacacactgaggcagcacattgttttgcattactttagcgtggtattcatatggaattcatgacgtttttttattttcttgcatacgaaccccaccaaatgactgcttcatattgctcttttgagaattgttgactgagtggggctggctatgggctttcattttatacatctatatgtctacaagtatataaatactataggtatatagataaatagatatgaagttacttcttcaaatgttcttgccacttcctaatggaaattgcttctagtcatctgggcttatctgcttgggcaagagtgaattttccctggagcccaaagccaggagactaccgccacactaaaatattgtctagggctccagatgtttctagttttaaactttccactgagagctagaggattcatttttttcaaggaacatgcgaatgaatacacaggacttactatcatagtaatttgttggctgatatattcaacttcctactgttgggttatatttaatgatgtttctgcaatagaacatcagatgacatttttaactcccagacagtaggaggaagatggtaggagctaaaggttgcggctcctcagtcaatttatatgaggggagcaacaactctgtaaaagaatggatgaatatttacaactatacatataaacatctctataattacaactaaattgttctgccctcttcataaactcaacctgaagtgggtggttttgttgttgttgttgttgttgttgttgatgatgatgatgaattttagattttagattttttgggtttttttttcttcattgtgatgatttttttttttaatgctgcaagacttaggattactgttaagaaagtaacccaatcacattgtgaccctggtgaatatcagtccagaagcccatgaactgcatttgtctcctttgcattggtttccctgcaagtaactccacacaggattgtgggtgagaaggcacagtggttggaaagttttgagagcaaaagcgtctccaaactctctggtctagttgacgggctgaaatgtctaaacaaatgcaagtcattgaaccaggagaaaaagtgcaacagaaagctaaggactgctaggaagagctttactcctctcatgccagtttcttcttcttagcatttaaagagcattctctcaatagaaatcactgtcctatcattttgcaaatctgttacctctaacgtcaagtgtaattaacttctagcgagtgggttttgtccattattaattgtaattaacatcaaacacagcttctcatgctatttctacctcactttggttttggggtgtttctagtaattgtgcacacctaatttcacaacttcaccacttgtctgttgtgtggacaccagtttccttttttcatttataatttccaaaagaaaacccaaagctctaagataacaaattgaaatttggttctggtcttgcttttctctctctctctcctttatgtggcactgggcattttctttatccaaggatttgttttcaccaagatttaaaacaaggggttcctttcctactaagaagttttaagtttcattctaaaatccaaggtagatagagtgcatagttttgttttaatcttttcgttttatcttttagatattagttctggagtgaatctatcaaaatatttgaataaaaactgagagctttattgctgattttaagcataatttggacatcatttcatgttctttataaccatcaagtattaaagtgtaaatcataatcagtgtaactgaagcataatcatcacatggcatgtatcatcattgtctccaggtactggactcttacttgagtatcataatagattgtgttttaacaccaacactgtaacatttactaattatttttttaaacttcagttttactgcattttcacaacatatcagatttcaccaaatatatgccttactattgtattatattactgctttactgtgtatctcaataaagcacgcagttatgttac

SEQ ID NO: 234 - DNA, 1138 bp, Mus musculus
cgcacagctccggagctccagaaatggctaccgcgatgacagtttccagtaaactccgcggcctgctgatgcagcagctgagaggtaccagccagctgtacttcaacatcagccttcgatctctgagctcctctgcacaagaggcctccaagagagcccccgaggaagtctcagaccacaactatgagtctattcaagtcacaagtgcccagaagcatgttctccacgtgcagctaaaccggccagagaagaggaatgccatgaacagggctttctggagggagttggtggaatgcttccaaaagatatccaaagactcggactgccgggctgttgtagtctccggtgcaggaaagatgttcacttcaggtattgacctcatggacatggcctccgaactcatgcagccctcaggagatgatgcggcccgcatagcctggtacctccgtgacctcatcagcaagtaccagaagaccttcactgtcattgagaagtgccccaagccagtgattgctgccattcacggaggctgcattggcggaggtgtggacctcgtttctgcctgtgacattcgctactgcactcaggatgcttttttccagatcaaggaggtagatatgggcttggctgctgatgtaggaacactgcagagactgcccaaggtcatcgggaaccagagcctggtcaacgagctgaccttctctgcccgcaagatgatggctgacgaggccctggacagtgggctggtcagccgcgtgttccaagataaggacgccatgctgaatgcagcctttgccctggcggctgatatttccagcaagagccctgtggctgtgcaggggtcaaaaatcaatctcatctactcccgagaccattctgtggacgagagccttgactacatggccacctggaacatgagcatgctgcagacccaggacatcatcaaatcagtccaggcagccatggagaagagggacacaaaaagcatcaccttctccaagctctgaatgtcttccggaccctgagagaggaggactccacggagccaggcctcctcccatggggtgtcccagtgtataactttatgacttagttcttcatttcctggggccttatcttcactgtgaacaataaagtt

SEQ ID NO: 235 - DNA, 2580 bp, Mus musculus
ttaccctcctgggcactgggccaccgccccaccaaccccccttctccggacatggagccagagccggcggctcagaagcagccccgacctcggaggagaagccgcagggtctcaatgctcagcgaggaacctgccgcggggcttccggccgacacacccgggccggcggcgaacgagagatgctcccttcggagaggcagctccttcacatttttaacccctggcccacactgggacttcactttgaaaagaaaacgaagagagaaagatgatgatgctgtaagccttagcagccttgatttgaaggagccaagcaataagagagttcggcctctagctcgggtcacatctttggcaaacttaatctctcccgtaagaaatggagcagtcaggcgcttcggtcagaccatacagtcgtttacccttcgtggtgaccacagatccccagcctctgcccagaagtcattcagcaggtccaccgtccccacacccaccaagagaagaagcagtgcactatggtcggaaatgctagacatcaatatgaaggagtccttgaccactcgagagatcaaacgtcaggaggccatatatgaattgtcccgaggggaacaggacttgattgaggatctcaagctcgctagaaaggcctaccatgaccccatgttaaagctgtctatcatgtcagaagaggaactcacgcacatatttggagacttggatgcttatatacctctgcacgaagatctgttagcaagaattggagaagcaaccaagcctgatgggactgtggagcagatcggtcacattctcgtgaactggttaccaggcctgaatgcctacagaggctactgcagtaaccagctggcggccaaggctcttctggatcagaagaaacaagacccaagagtccaagacttcctccagcgctgtctggagtctcctttcagtcgaaaactagatctttggagtttcctagatatccctcgaagtcgcctcgtcaagtaccccttactgttaaaagaaatccttagacacactcccaaagaccaccgtgatgttcagcttctagaagaggcaatattgataatacaaggagttctttctgatatcaacttgaagaaaggcgaatctgagtgtcagtattacatcaacaagctggagtacctggacgagaagcagaaggaccctaggatcgaagcgagcaaagtgctgctgtgccatggggagctgaagaataaaagcggccataaactgtacattttcctatttcaagacatcttggtttggactcggcctgtcaccggaaatgagcgccacttgtaccaggtttaccggcagcccatcccagtccaggagctggtgctggaagacctgcaggacggggatgtgcgcatgggtggctccttccgaggggccttcggcaactcagacaaagctaaaaatatctttagggtccgcttccaagacctttctccaggccactcccacacactgcaagccaatgatgtgttccataagcagcagtggttcaactgtattcgcgcggccattgcccccttccagcgggccgccagccccttagagcttcagggcttgccagacctccacgaagagtgtgaagagaacaacccttctgctgggaacctcagagcccagcgacggtcatgcgtggtttcctggtgtcatgcagatagacgaggaaagcgcctggattgtggctccagtgtacagacagtggaagacaccaggaacatgaaggcacagcggcctcagcctggcttacgaagagcaagccacaaagcacagtcaggtggcaaaaagaaagagactttggtgtaaagtgtgtattccctgatggggagctgtttatttataaatgtgtacagtttttcttataatgggagcatcaagggttactctgtaccagaagtaatgtgttcatggtttgggtctctctctcatcctctccctctcccttccccccgcccccaatcgtcgtcatgtcattgatgttgtccttgtcgtcctcgttgtcatcgtcatcgttgttattaatggcagctacagatacacagattactgttaaattggagactttaaaaaggtattttcatggattatttggaacatgccaacttggtgtattttatcagaagcagtgtgtgtggagccggtgctgtcctcacctggttccccatgactgagcaaatgtcacagtgtttgccaggcttaaacgcttgcaaatgctgagactccatcagtgttctctgtgaaacctcagagggagcatggaattgtaatagtgacacctacgatccgcatggaacagatttgagattgaaatcttttgtattgacagtgaagtcccgcttccttgagaacaagcgtgaagctggatgtcttccccctttgtctcaactggaatgaacaaacacccgtggcagtctcactgcacggttcgccttctgcattcatttattctgccaactatttaattttttttttattgtaaagtagtttttagtatttgcttttatttttttacattgatgcctttttaaagtggcatgtccggtaaat

SEQ ID NO: 236 - DNA, 2176 bp, Mus musculus
gctgctgctagagtccctcggagcggcgcttgcagctgggaagatgcggggccaaagtcttctcacctgggtcctagccgcggcagtcacctgcgcccaggcacaggatgtgccgccgtggacagaagattgcagaaaatcaacgtatcctccttctggaccaacctatagaggaccagttccgtggcacaccataaatcttgatttaccaccctacaaaagatggcatgaattattggctcaaaaggcaccagcgttgaggattttagtgaattccataacgagtttagtgaatacatttgtgccaagtggaaaactaatgaagatggtggatcaaaagctgcctggtatgattggcagccttcctgacccttttggagaggaaatgaggggaattgcagatgttactgggattcctctaggagagattatttcattcaacattttctatgaattgtttaccatgtgtacatcaatcataactgaagatgaaaaaggtcatttactacatgggagaaacatggattttggaatatttcttgggtggaatataaataataacacttgggttgtcacagaagaattaaagcccttaacagtgaatttggacttccaaagaaacaataagactgttttcaaggctacaagttttgttggatatgtgggcatgttgacaggattcaaaccagggctgttcagtctttcactaaatgaacgtttcagtataaatggtggttatctgggtatcctagaatggatgttcggaaggaaagatgctcagtgggtagggtttatcactcgatcagttctggaaaacaccacaagttatgaagaagccaagaacacactgaccaagaccaagataatggcgccagtatattttatcctgggaggcaagaagtctggagagggttgtgtgatcacacgggaaagaaaagagtctttggatgtctatgaacttgatcctaagcatggcagatggtatgtggtacaaaccaattatgacaggtggaaaaacaccttgtttattgatgaccgcagaacaccggccaagaagtgtctaaatcacaccacacagaagaatctctcctttgctaccatctatgatgtcctatcaacaaaacctgtcctcaacaagctgactgtattcacaaccttgatggatgttaccaaaggtcaatttgaaagtcaccttcgagattgcccagacccttgtataggctggtgagcacacgttggccagcctcgaggacgtactgagacccgaagatgtgttgtgcagcgagcgtgcctggtctccttccataggctaaggctcaaggcctcttgtctttagtcaggactgccctcatcatgttacattgtttacaggctgttttgttgtttgtttgttctgatgatcatcatcacttcgactcacaggtaaattctttaagggacaccacatagaaattgccagttcatttcactttgccactacggaaagggtaactgtgacctccatggaacccatcaaagttctctgatggtgtttgagtcagcgccctgtgtgattaatgtaaaagttacattttcttttttaatctacatacttatgtttttctgtacaccagtagttttccttttcctggttctctcttagaaccaacctgccattcacctttgctggtggtgacagcagtgcaatgtcgctatgcttggctggagtacctcagatggacatttgatacttattttaatgggcaatcaatagacctctgactctagaaacagtgttttggaggattataaaataactattatacaaacactatttttttaaaaaagaataagtgttctctttttcctagttattctgcctgccagtaaccccaggaagagtctagcttcaaaaacttgagttcaagaacttaccacaaactcattatttttaattcttttatgtataatcaatgtaatgttttttccttctaatcatatttttttagattttcatacaatatagtattaatatttttcagaaatcaatgtatttatgaaaactgcaaacagaacttgttcatctttctaaccttcacagttgacagtgaagcattctgtacagtgtggcagactgtatccatttagttttggacagtctgcggtgtcgtgatgcgcaataaacagtcactgtcag

SEQ ID NO: 237 - DNA, 6288 bp, Mus musculus
  modified_base (2855)..(2855): a, c, g, t, unknown, or other
gcccaccccgggaatccccgccaggccgccgagcccgaatgtccttttagttggtgtttggcatcattatagagtacactgaaccttgaagatgttggaaaccatagacaaaaatcgggccctgcaggcagcagagcgcttgcaaagcaagctgaaagaacgcggggatgttgcaaatgaagacaaattgagtctcctgaagtctgtcctgcagagtccactcttcagtcagatcttgaaccttcagacttcactacagcagctaaaagaccaggtaaacattgctactttggcaactgcagctgctgaccatgcccacactcctcagttcagctctgctgtcatttctaacctgcaaagtgagtcacttctgctgtctccaaatcatgggaacctggaagcccttcctggacctggtgctccagctgtcatggatgggaagcctacctgtgacgaacttgatcagctcattaaaaatatggcccagggtcgccatgtggaaatatttgagctccttaaacctccgtgtggaggcctcggctttagtgttgttgggctcagaagtgaaaacaggggcgagctggggatatttgtccaggagattcaggagggcagtgtggctcacagagatggcagacttaaggaaaccgaccagatcctcgccatcaatggccaggtcctagaccagacgatcacacaccagcaggccattagcatcctgcagaaggccaaagacaccgtgcagcttgtgattgccagaggatctttgccgccggtctccagcccacggatttcccgctctccatcagcagccagcaccatttcagcccactcgaatccaatgcactggcagcatgtggagaccatagagctggtaaacgatgggtccggcctggggtttggcatcataggaggaaaggcgactggtgtcatagtgaagacaatcttgcctggaggagtagccgaccagcatgggcgattatgcagtggagaccacattctaaagattggtgacactgacctagcaggaatgagcagtgagcaagtagcacaagtccttaggcagtgtggaaatagagttaagctgatgattgccagaggtgctgtagaagaaacgccagcatcctcctctttgggcatcaccctctcctcttccacatcttctacttcagagatgcgagttgatgcttctactcagaaaaatgatgaaagtgagacgtttgatgtggaactcactaaaaatgtccaaggactaggaattaccattgctggttatattggagataaaaaattagagccttcaggaatctttgtaaagagcattacaaaaagcagtgctgtggagcatgatggaagaatccaaattggagaccaaattatagcagtcgatggcaccaaccttcagggttttaccaaccaacaagcagtagaggtgttacgtcacacaggacagacagtgcgtctgacactgatgaggaagggagcaagccaggaagcagaacttacgtcaagaggagacactgcaaaagatgtggacctcccagctgaaaattgtgaaaaggatgaagaatctttatcattgaagagaaataccagcatattaccgattgaagaagaagggtttccactgttgtcagctgagctggaagaagctgaagatgtgcagcaagaggctgccctgctgaccaagtggcagaggattatgggaattaactatgaaatagtggtggctcatgtgagcaagtttagtgagaatagtgggctgggaataagtctggaggcaactgtgggccaccacttcatccggtctgtgctaccagaaggccctgtgggacacaacgggaagctcttcaatggagatgagctcttggaagtgaatggtataaatttgcttggggaaaaccatcaagatgtggtcaatattttaaaagagttgcctatagatgtgacaatggtatgctgccgtcggactgtgccacccattgccctatcagaaatggatagcctggacataaatgatcttgaactcacagaaaagcctcatatagatctaggagagttcattgggtcctcagagacagaggatcccatgctggcgatgtctgatgtggatcagaatgcagaggagattcaaacaccgctggccatgtgggaggcaggcggtcagtccatagagctggagaaagggagcagaggccttggcttcagtattttagactatcaggacccgatcgatccagcaaacacagtaattgtcattcgttccctggtgcctggtggcatagctgaaaaggatggacggctttttccaggagacaggctcatgtttgtcaatgacattaatctggaaaacagcactcttgaagaggccgtggaagccctgaagggagcgccctcagggatggtgcggataggagtggccaagcctttgcctctgtcaccagaagaagggtatgtttcagccaaggaagacgcctttctctgctcaccgcacgcctgcaaggagtcaggcctgtccgacaaagccctcttcagggctgacttggctctgatagatacacctgatgctgagtccatagctgaatcacgatttgaatctcagttctctcctgataacgacagtgtctactctacacaagcctccatcttctctcttcatgatggtacttgcagtgatggcatgaactacggcccctctctctcatcatctcctcccaaggatgtgaccagcagttctgaagtagtgcttggtctgcatttgtccctggaagaactctacacacagaacctccttcagagacagcatgctggctcttcttccacagacatgaagccaacacccacctttggtttcnccatcagtgactacacaactaccaatgctggtgaacaaaaataccaatgggcaaacccagtagcgtggcctcactcgcagttaccaagtaacctaagcaccttcgagcttgcttctgcacttgctgctgtggctccaaaatatttaactgaccaaacttttttggcatctgatgctgagtctgtcaccttgcagagtatgtcccaggaagcttttgagaggcccgttactatagcaaaaggcagctccagcctaggtatgacagtaagtgccaataaagatggcctgggagtgattgtgcggagcatcattcatgggggcgccattagtcgtgatggccggattgctgtgggcgactgcattttgtccattaatgaagaatccaccatcagtctaaccaatgcccaggcacgggccatgctcagaagacattctctaattggacctgatatcaaaattacttacgtgcctgcagaacatttggaagagttcagagtaagttttggtcaacaagctggaggaataatggcactggatattttttcttcatacactggcagagacattccagaactcccagagcgagaagaaggagaaggggaagaaagtgaactgcagaatgctgcctacagcagctggagccagccacggagggtggaactttggagagaaccaagcaagtccttgggcatcagcattgttggtggtcgaggaatggggagccggctgagcaatggtgaggtgatgaggggcattttcatcaaacatgttcttgaagacagtccagctggcaaaaatggaactctgaagccaggagacagaataattgaggtggatgggatggacctcagagatgcaagccatgaacaagctgtggaagccattcggaaagcaggcaaccctgtagtgtttatggtacagagcattataaacagaccaaggaaatcccctttgccttccttgccgcacagcctttaccctaagtacagcttcagcagcactaacccatttgcagactctctccagctcaccactgaccaggcacccagccagtcagaatctgagacagagaagcctgcattgtgcaatgttcctccctcctctccttcagtgttctcagaaatgggtagtgattgtgcacagccatctgcaaccgcagtctcagaagatgaggacaaagaggatgagtttggttacagctggaaaaatatccaggagcgctatggaagcctgacaggtcagctccatgtgattgagctggagaaagggcagagcgggttgggtctgagtcttgctgggaacaaagaccgcaccagaatgagtgtgtttatagtggggattgatcccactggagcagcggggagagatggccgactacagattgccgacgagcttttagagatcaatggccaaatattgtatggcagaagtcatcagaatgcttcatcaattattaaatgtgctccatctaaagtaaaaataatttttatcagaaatgcagatgcagtgaaccagatggccgtatgtcctgggattgcagcagactctccgtcttccacctcagacagtcctcagaacaaggaggtggaaccatgcagtactacatctgcttccgctgcggacctcagctcacttacagatgtgtaccagctggagcttcctaaggatcaaggaggtttaggcattgctatctgtgaggaagacacaatcaacggagtcatgatcgaaagcctaactgagcacgggggagcagccaaggatggaaggctcaaacctggagatcacatcttggctgtagatgatgaagttgttgctgggtgtcctgttgaaaagttcatcagccttctgaagacggcaaaggcaactgtaaaactgactgttcgagctgagaatccagcttgtccagctgttccttcttcagctgtaacagtcagtggagaaaggaaagacaactcccagactcctgcagtcccagctccagacctggaacccatcccaagtccaagcaggtcctccacaccagcagtctttgcttctgaccctgccacctgccccatcatcccaggctgtgagacaacaattgagatttccaaaggccaaacaggcctgggactgagtattgttgggggctcagacacactgctgggtgctattattatccatgaagtttatgaagagggagcagcgtgtaaagatggaagactatgggctggagaccagattttagaggtaaatgggattgacttgcgaaaggctacacatgatgaagcaatcaatgtcctgaggcagacgcctcaaagagtacggctgacgctctaccgagatgaggccccatacaaagaggaggatgtctgtgataccttcaccatcgagctgcagaagaggccaggcaaaggccttgggttgagtattgttggcaaaagaaatgacactggagtatttgtatcagacattgtcaagggaggcattgcagacgccgatgggagactgatgcaaggggaccagattttaatggtgaatggagaagatgtccgtcatgccacccaggaggcagtcgctgccctgctaaagtgttccctaggtgcagtaaccctggaggttggaagagtcaaagctgccccattccactcagaacggaggccttctcaaagcagccaggtgagtgagagcagcctgtcatctttcactcccccactttctggaataaatacatcagagtcattggaaagtaactcgaagaaaaatgcattagcatctgaaattcagggactaagaacagtcgaaataaaaaaggggcctgctgactcgctgggactcagcattgctggaggagtgggcagcccgctcggagatgtccctatatttattgcgatgatgcacccaaatggtgttgcagctcaaacacaaaaactcagagttggggataggattgtcaccatctgtggcacatccacggatgggatgactcacacacaggcggttaacttgatgaaaaatgcctcaggctccattgaagtacaggtggttgctggaggagatgtgagtgtggtcacgggtcatcagcaagaacttgccaatccttgtcttgctttcactgggctgacatcaagcagtatatttccggatgatttaggcccttcacagtctaagaccattaccctagaccgaggaccagatggcttaagcttcaacattgtaggcggctatggcagccctcatggagacttaccaatttatgtgaaaacagtgtttgcaaagggagcagcagcagaagatgggcgtctaaaaaggggcgatcagatcattgctgtcaatgggcaaagtctagaaggagtgacccatgaagaagctgttgccatcctcaagaggacaaagggcaccgtcaccctcatggttctctcttgaagtgactgccagagctgaagcaggcagcc

SEQ ID NO: 238 - DNA, 2839 bp, Mus musculus
ccttaatcggccacctgccgcgttctacagcctctttgcatctcggatttcggggcggctccctcccccatctttccctgcttctttgcaccccgctttttctgcgtttcgctcgaattttggagccgtctggttttgcacccctttttgttttgcttctaggcggtgtgtggggtgaaggtgcctcggcatccctttccctggttatctttccctgttttgacagcccccctttctatcgcagtcggggggcctagcctcggtgcaccttcgccgcactgccagcagaccacagtgcgtggctgtgcaccccggaatttgcagcagctgtatatctgactggagtctccctgcctcgctcccgcgcgcatttggtgcgtggagggcttcagcgcgcgacgccccggcttctccgcagcccccagcagcgcgccgggactcgccccgtgcctccaagatggtcatccagaaagagaagaagagctgcgggcaggtggttgaggagtggaaggagttcgtgtggaacccgcggacgcaccagttcatggggcgcaccgggaccagctgggccttcatcctcctcttctacctcgtcttctatggtttcctcacggccatgttcagcctcaccatgtgggtaatgctgcagaccgtctctgaccatacccccaagtaccaggatcgactggccacaccaggcttgatgattcgacccaagactgagaaccttgatgtcattgtcaacattagtgacactgaaagctggggtcagcatgttcagaagctcaacaagttcttggaaccttacaacgactccatccaagcacagaagaatgatgtctgccgtccagggcgatattatgagcaacctgataatggggttctgaactacccaaaacgtgcctgccagttcaaccggacccaactgggcgattgctctggcattggggaccctacccactatggttacagcaccgggcagccctgtgtcttcatcaaaatgaatcgggtcatcaacttctatgcaggggcaaaccagagcatgaatgtcacttgtgttggcaagagagatgaagatgctgagaaccttggccactttgtcatgttccctgctaatggcagcattgatctgatgtactttccctactatggcaaaaagttccatgtaaactatactcagcctttggtggctgtaaagttcctgaatgtgacccccaacgtggaggtgaatgttgaatgccgcatcaacgctgccaatattgccacagacgatgagcgggacaagttcgctggccgtgtggccttcaaactccggatcaacaaaacctgaggctccccacccccacccgcccacactctcctgtggatgcttctggaatgtccttgaccctgcctgatccctccctcacccaccccaaaggtattttttataatagagctatgacttgtctgagcctcacaccctttcctcaacttctctacctagcctgatgcccacacaatttccaacatcttccaaccttagcttagccagagacagagaggagtcgggagttttctagttcgggaaccggagttgtcactcagcgacagaggacttgcctagcaagcacgagggcctcagcattgttggaggttttctagtttgagtttatgaatgagatgcccttacagctcctgtttcagtttctactcccatccccttagaggtacaggaaatggtctcatccacccagcctctaccccacagatccctcgaacccgtttcagccacttgcttcccaggggtgaacactgtccttcttccttttacaaggttctagccactttcctttcatctcttcacacttctgtcaccatagccagtatcttggtggctttgacttctggttcctccagcagttctgccctctcctctccctgatccctctccctctgaaaagctgccatttgtagctcagtacaagttggttctgtggccttttccgtccttcctgatacatcctgcttctcccccaactgtgactccaaaggatgactggaagagaagtctttaattcttctagaaaattctctagtaggcttagacttttaacttcttcctggtccctcctgtcatccaaacggctcctactcaggcgggcttgacctgctctgaatatccactttgttttttaactgatggctcccttcccccactggccttcccagaatatctttcaaattctccttcccagggagctctgtgggggaggggccgctgtcttggctctatccccagcagccaccttggaaacgtcagctggctggggggactccctaagcccagatctacccacccccatcctctctctggctactccttgcaagttgctaactggtcactaaggtcttccctttctgcatgccagcctgaaagcgtcagacaccctcctccagctcagctctgagtttctttgctccgcctccttcaaactcttttgcctttaaaaaacaaacaaacaaacaaacaaccctatgacatccctagaatgttgcgaaagagccccctgctccaagttttcgtccatcagagcagcatattcctctagtctctctgcttctctttaatcctttccaatctcctcttcaccgcagcccccacgtcccaccctcaagtggctccttccctctttcctcccgctggatctgtgtctcttccctttgggtatccaggtcttcctgccccttcatcttcccagtggtctccttctgcagttatttaatgcctgtgtcagatctactgtaaaaagagggtaaagtacaataaactgagagcgattataaaaaaaaaaaaaaa

SEQ ID NO: 239 - DNA, 1424 bp, Mus musculus
cggcgcgtgggcggacgcgtgggtccagggctatctttgactggttccatatcatcgttatccgcacccggacttccatccaggcacgcactccaacgtggcaagaatcaaagttctcaaactatagatctggcgatctgggcagaaagaaacccagaggctgcgtctgctgctgatatcccctttgatgtgagtcatggtagcgcctatgaagggccaagtgtgtgtggtaactggtgcctccaggggtattggccgtggcattgccttacagctttgcaaagcaggtgccacagtttacattaccggccgccatctggatacgcttagagctactgcccaggaggcacagtccctcgggggccggtgtgtacccgtggtgtgtgattcaagccaggagagtgaagtgaaaagcctgttcgagcaagtagatcgggaacagaaagggcggctagatgttctggtcaataatgcctatgctggcgtccaggcaatcctgaacaccaccaacaagtctttctgggaagtgcctgcctccatttgggatgacataaacaatgttggactcagaggccactacttatgctctgtgtatggggcacggctgatggtgccagctggcaaaggactcatcgtgattgtctcctcccctggggggctgcagcatatgttcaatgtcccttatggtgtgggcaaagctgcgtgtgacagactggctgctgactgtgcccatgagctacggcgtcacggagtcagctacgtgtctctgtggccagggctggtgcaaacagaaatggtgaaggagtttatggcaaaagaggatactcctgaggaccctctatttaagaagatgaaaccagatttctcatcagccgaaagtccagaaatgagtggcaagtgtgtggtggccttggcaacagaccccaatatcctgaacttgagcgggaaggtgctgccgtcctgtgaccttgctcggcgctatggccttaaggatatcgatggccgccctgtcaaagactacttttctctgggctatgccctctcacaagtctccagcctgggatggctgaactccttcttgcctggcttcctccgtgtacccaagtgggtcgtcaccctctacaacagcaaattctaacctcctgacctgccatcccagcccttccagaacctcgtcttattgaggctcaggtgggtggggctgtcttggtagaacaaacccgctttcccacatactcatgccctcaccatgaagagaaggtggctgcaggaagtctagtgcattctgggggctctggtaggttctttgtgccttttccctgtctctacatcttaatattttgcttgagtaattataagtgcttataaatagaagttaataaaggtctcatctccccttcaaaaaaaaaaaaaaaaaaaaaaaa

SEQ ID NO: 240 - DNA, 2299 bp, Mus musculus
ccacgcgtccgcccacgcgtccgcctagctcggcgttggagttgagtcgcctgaggtccccgccgacgacgcactcaccatggcgcctgctaaccttgggctgacgccgcactgggtgatgctcctcggtgccgtgctgctgttgcttctgtccggagcctccgcgcaggaacctccgagagtgggttgctctgagtacacaaacagatcctgtgaagagtgcctcaggaatgtctcctgtctgtggtgcaatgagaacaaggcgtgtatggactacccagtgaggaaaatcttgccccctgcttctctctgtaaattgagttccgctcgctggggcgtatgctgggtgaacttcgaggccttgatcatcaccatgtcggtcctggggggctctgtgctcctgggcatcactgtgtgctgctgctactgctgccgccggaagaagagccggaagccagacaagagcgatgagcgggccatgagagagcaggaggagaggagagtgcggcaggaggaaaggagggcggaaatgaagtcaagacatgatgaaatcaggaaaaaatacggtctgtttaaagaacaaaacccgtatgagaagttctaaggtggctggcacacacttgtggtggatcgtgcagttccagagtttcctgggaatgcactccccagcagagcctgcagagacctcaccaccatggccacccttgacctgggtgatccctccagcctctactggcaccagtgtggccttaagaggacaatcctactcttgttccctctgtgtctgtatgtaatcacctgagaccttaatctcgttgatgtcctttttggggggaggaagtatacttggtccccacactctgcaagccgattacgaagctggcagcctgaggtgctgactagctgctgagtggccttgctggaagattcacattgcaacaagcaagagtcatgtttactttgttaaggcaagaactgaccaccacccttgcttcctgaaggctgtgttttgtctgtaggcccactgctgtgatgggcccttgttgttgtaattttggtggcctcttggaaggcactgtccctaagtctggtaaggattgccttcctaacccagctccatccaatagcacaaaagcttataaagtcacctgaagtctttaataatccctcaggaagcagtcctaccaaaacctgccatgagacgtccaggcctcttggatgacatttttcattttcagtctttactagactgagaatttcctgctgtgggaaacctgagctctgaatttagtttgatcctcttgtgagtgctgaatgtccagcatgctggtgcatggactccagtgtccttagaagggctttgtggagggtcttggacatctccctccacagatcaggcagctgttgagttggtcctgtatgtatcatggaggatgaacagcatctccactggccatcccattgtgggagctgagtgtgtaggaagataggaggaccccacaccattctgccttccaggaaaactgcctgagctggcatagacacccacctcacttccaccctgcttccagccatgcctcctcacctatcgtgcctgacacatccgcacgggccctgggaaggttgtcaggagacactcgggtccctgagattccgtccacgctgtacatttctttgaaatccagatgtgtcctagtaagcagatcacaaccctgatggcagggtaaggagtaaagatattccctctgggaaagcagccaccagcagatgaggtggtcttactgtaggctccctcatgcctaagacctcacctagcatctcggtaaccttttcacctgtcagtctgtccagggattaatattttcctctcttcagatttccacaaagtaagggaataacctttaccacaatctggagtcttaccatttttctgctttgctaggcatttgatggaacttaaagccttgtcaaacatttcttaagtattatagcaggcattgagagttatctttctcctgtctattgaaagggaaccctccttacaggccctgatgaacttcgtattaatatgtcgcctgtataaattgtacctgttaggttgctgagctgatgttagagtatttaattctccagcctaaggagtgcagcaggtgctcgtgggagtggtctgtgcctacctttgagcagcatgaagccacagaaccaagcctgacaccatcacaccccgtgccttagtttttaaccactgtccaataaaatggttgaatatgaaaaaaaaaaaaaaaaaaaaaaaaaaaaa

SEQ ID NO: 241 - DNA, 1960 bp, Mus musculus
ctgcagaatcctttgcttacggatctctgagatcgagccgccttgcttccctcccgttcacgtgaccctccgattgtcacgcgggcgtccgctcagctgaccggggctcacgtgggctcagcctgctggccggggagctggccggtgggcatggccggctgcaggctctgggtttcgctgctgctggcggcggcgttggcttgcttggccacggcactgtggccgtggccccagtacatccaaacctaccaccggcgctacaccctgtaccccaacaacttccagttccggtaccatgtcagttcggccgcgcagggcggctgcgtcgtcctcgacgaggcctttcgacgctaccgtaacctgctcttcggttccggctcttggccccgacccagcttctcaaataaacagcaaacgttggggaagaacattctggtggtctccgtcgtcacagctgaatgtaatgaatttcctaatttggagtcggtagaaaattacaccctaaccattaatgatgaccagtgtttactcgcctctgagactgtctggggcgctctccgaggtctggagactttcagtcagcttgtttggaaatcagctgagggcacgttctttatcaacaagacaaagattaaagactttcctcgattccctcaccggggcgtactgctggatacatctcgccattacctgccattgtctagcatcctggatacactggatgtcatggcatacaataaattcaacgtgttccactggcacttggtggacgactcttccttcccatatgagagcttcactttcccagagctcaccagaaaggggtccttcaaccctgtcactcacatctacacagcacaggatgtgaaggaggtcattgaatacgcaaggcttcggggtatccgtgtgctggcagaatttgacactcctggccacactttgtcctgggggccaggtgcccctgggttattaacaccttgctactctgggtctcatctctctggcacatttggaccggtgaaccccagtctcaacagcacctatgacttcatgagcacactcttcctggagatcagctcagtcttcccggacttttatctccacctgggaggggatgaagtcgacttcacctgctggaagtccaaccccaacatccaggccttcatgaagaaaaagggctttactgacttcaagcagctggagtccttctacatccagacgctgctggacatcgtctctgattatgacaagggctatgtggtgtggcaggaggtatttgataataaagtgaaggttcggccagatacaatcatacaggtgtggcgggaagaaatgccagtagagtacatgttggagatgcaagatatcaccagggctggcttccgggccctgctgtctgctccctggtacctgaaccgtgtaaagtatggccctgactggaaggacatgtacaaagtggagcccctggcatttcatggtacgcctgaacagaaggctctggtcattggaggggaggcctgtatgtggggagagtatgtggacagcaccaacctggtccccagactctggcccagagcgggtgccgtcgctgagagactgtggagcagtaacctgacaactaatatagactttgcctttaaacgtttgtcgcatttccgttgtgagctggtgaggagaggaatccaggcccagcccatcagtgtaggctactgtgagcaggagtttgagcagacttgagccaccagcgctgaacacccaggaggttgctgtcctttgagtcagctgcgctgagcacccaggagggtgctggccttaagagagcaggtcccggggcagggctaatctttcactgcctcccggccaggggagagcaccccttgcccgtgtgcccctgtgactacagagaaggaggctggtgctggcactggtgttcaataaagatctatgtggcattttctct

SEQ ID NO: 242 - DNA, 1603 bp, Mus musculus
ggagcggaggccggaagtggccgtactgcggagtctggaaagttagaaagtctgggagggcggagcggcggagttcgcggagacgtcactctcggttctcgcggctgagcagggatttaaccgccaccatgtctagcaaaagggcaaagaccaagaccaccaagaagcgccctcagcgcgcaacctccaatgtgttcgccatgtttgaccagtcccagatccaggagttcaaagaagcccttaacatgattgaccagaaccgggatggcttcattgacaaggaggacctgcacgacatgctggcgtcaatgggaaaaaaccccactgacgaatacctggacgccatgatgaacgaggccccgggccccatcaatttcaccatgttcctcaccatgtttggggagaagctgaacggcactgaccccgaggacgtcatcagaaacgccttcgcttgctttgatgaggaagccatcggcaccatccaggaggattacctgagggagctgctgaccaccatgggcgaccgcttcacagacgaggaggtggatgagctgtacagagaggcccccattgacaaaaaggggaacttcaactacattgagttcacacgcatcctgaagcacggcgcgaaagacaaagatgactgaagagctgcggcggcttccagcccattgctcccgttgccattggggtatttctgagattttctcctggagcccaatgcatgccctagctttactgctttttgcctttcttgttttatatttattctcagccattttgggccacatgtaccttataatactggaaatgggaccttctgtcattgtgatgagaaagtaagttcatttaacttacaggcagtcttgtcccttgtaatcactgcagcccagaatcaatatattttctcagagaaagttatccactcaattttttctgatttataattaaactttctgataaaatgcttagttgtttagcgttatttgccacttgacttttagtttcacgtacgcctttctctctaagcaccgtgggccaagtgaatgacagtcctgtcagggtttggtccgactgcttccagttgtgttattaaagcaatcctggttttctccgctcctgttcatttctccctccagggaaatcagataaagcccgagttgggggccctagactttgtctttcttttggaagatagttcctgcagaattgtgaccctgcattagctctgccgccagctggacggacctgctttacctcgtccatgtaaacttcctgccaccgaaactagcagccgctgagcacactaagttttctgtgttctattttaaaggttctttggaatgcttttaacaaaaaggacagatttcgctgtgtttccagctgttggaaatatagtatttttttttgtatacagtttttccttattataacaacccctattaaaagacctgtttgtttatacagagattcctcctaagtccatatgagaatgttagacattcctgacctacccacagtcagaacagctgtggctgcatgcctgggaaagtgaggtcattgtttcaaccctataaataacttgggtcatttttgataactg

SEQ ID NO: 243 - DNA, 1642 bp, Mus musculus
taagctgggaggcggtggcctctggctgctcggccgcgcgccccctctgcccgctgctcccgcggggctcctgatctgcggccgccggtccagtccgcgccccgccgactccatcctctgcgcccaaatcggggcgaagatccgtctaggctggaaagaaagggacgcgggagcggccacggcagggttaacctctgcttctgctcatcatgggagagatcaaagtctctccagattataattggtttagaagtactgttcccctgaaaaagataatcgtggatgacgatgacagtaagatctggtcgctctacgacgctggccccagaagcatcaggtgtcctctcatctttcttcctcctgtcagcggaactgcagatgtgtttttccagcagattctggctttgactggatggggttaccgggttatagctttgcagtatccagtttattgggaccatcttgaattctgtgatggattcagaaaacttttagaccacttacaactggataaagttcatctgtttggggcatctttgggaggctttttggctcaaaaatttgctgaatacactcacaagtctcccagggtacactccctcatcctgtgcaatgccttcagtgacacgtctatcttcaaccaaacatggactgcaaatagcttctggttgatgccagcgtttatgctcaagaaaatcgttttggggaacttttcctctggcccagtagacccgatgatggctgatgccattgatttcatggtggacaggctggagagtttgggtcaaagtgaactggcttcaaggctaactctcaactgtcagaattcctatgtggagccacataagatccgggacatccccgtcaccatcatggatgtgtttgaccagagtgcgctgtcaacagaagccaaggaagaaatgtacaaactgtaccctaatgcgcggagagcccaccttaagacaggaggcaattttccctacctgtgcaggagtgcagaggtcaatctttatgtgcagatacatctgctgcagttccatggaaccaagtacgctgccatcgatccgtcagtggtcagtgcggaggagctagaggtgcagaaaggccgcctcggcctcagccaggaagagccatagatggggcttgagatgccgaaccaccctgctcttgcacaatcagttcgggttcgttggtcgggcacactggtcctcacccttctggaagtcgtactgattgtcaatctcatgacaggcgtcagctcttctaaaccagtgtgactggcccctctccacatttgtttttgttttaaacttttaaatttgaagaacttttaaagactcccattttaagaattgtgaaaattttgctaccaaaagtcttctccactctgttcatctcaaaagcttgggatcatgtggcgttctctcttttcctgctttctataactgctgcacccacctccaggttagaagaggagcaccggtcatttttatgctttcttgggcataaccagagggtcgaggctggcagcctgctggccactccctacacatcagcttttttgctttccagttgagcacatcattttgagtattagctgttgtatttctagacattacatttggaataaaaattgaattcc

SEQ ID NO: 244 - DNA, 3431 bp, Mus musculus
cctacgcgtccggcattttggctcgcggagctgtgggaggcagcgcggaggagcccgcggtcggtgcttggtcgcggcggctggaactcggtaccaaacccgggccgtgaagcttcggcagccctgtagagccgcggaccgtcctctgcctcccggtgcccgcggcggcgccgagtctgacggggcgggggccacggcccctcgggctagcgaggatgagcttcctcttcagcagccgctcttcgaaaacattcaaaccaaagaagaatatccctgaagggtcccatcagtatgagctcttgaagcatgcagaggcgactctcggaagtggcaatctgaggcaagctgttatgttgcctgagggagaggacctcaatgaatggattgctgttaatactgtggatttcttcaatcagatcaacatgttgtatggaaccattacagaattctgcactgaggcaagctgcccagtcatgtcggcaggtcccaggtatgaataccactgggcagatggcactaatattaaaaagccaattaagtgttctgcaccaaaatatattgactatttgatgacttgggttcaggatcagcttgatgacgaaactctttttccttctaagattggtgtcccttttcccaaaaactttatgtctgtggcaaagactattctgaagcgtctcttcagggtttatgcccatatctaccaccagcactttgactccgtgatgcagctgcaggaggaggctcacctcaacacctcctttaagcactttattttctttgttcaggagtttaatctgattgataggcgtgagttggcaccacttcaggaattaattgagaagcttggatctaaagacagataaatgtttcttctagaacacagttatgctctccttctatctactgctagcactctctcattgctgtctggtatggactaagtgatactgactacaagaaaccaggatcaaaagatccattgtgtctgcagagaaaattgtcccaaaggtaggttggccagatagcttcagaacaatccaacgacaacagctaaatccgaggtgctgtgtggccaccctgttactgctagtgtcctcctttgtcttagcccatgactaacctgtagtttgttgctgagctttgtttaagaaaatgatttttcccatgtgacagcataatggacattaagaattttcagcagcaacttactagtaagtttctagaacaaatgtcttaacacagatcagtttgctttgttttacaaatcagtggtgttctgtttctaaatcccatcgtttagagcttctgttttactttggttcacatttgtatactgatgttttataggcaagagtgtatgtttttagctaggcatgatggtccatgcctgttacctgacaactgtggaggcagaggagagggtctcacatttgaagctggtttgagctacattgtgaaactgttgctaaaaaaagtttgttttacaaaatccacaaggcataaatcacaggcatatgtggactgagataaccaaagttattttaaatgactttattttctaaacttgtttgggattgtcttcatgtctagatgaggagagtgcatggcttctgacggtgccttgcaggttctcatttgagactcctcactcagattaatttcatatgtagcttgggggcagagatcaaaacaacttttaaagctctgagacacacttggaccttaaagccactgtgtgcattgctgtttccttgcaggtcttgcggggcagtaggaaaagtattcagactacttgattatttcctaaatgattccatgtttttatttgcaacttgaaacttctgtttctgtatagaaatgcacagacttcatggcaataaggacgaaggtcaaaaaccacagaatagcttgtgaggggtgggggtgttgtgtgtgtgtgacagcaggtctccttgggcctgtgagagctggagacccagcaaagagagtgagttgatagtaacttggcttcattctgcgcacaggctgcagtgacctctagagcttctatcctacttgtctttgtatcaaaacttgaatatttcctcatcctgtcaggataaaagactcctctactcgggaagtgcctgcttttcatgtggtcctcagatctagtcagctctggctgcctcctcagatgtacatgacatcccagggattctggacacttgcccagcaggcagagctggagttatcagcgttgtgtatcagagctgggacttacacagtgctcattggcctcctatatggctttataaaagttagagttgatgaggtttttgttatttattttgattccactagactatactggaaagtattgcttagaaactccagttttaataactcattttcagtatgttcttaagtatactcagaatttcaaaggaactgttttgattttactttgcctgaaaccacatatcactgttagaggaattcaaattggaatactgatttagaaaaaaaaggacagtttggaaacagctcacaacccaggagtatgcagaggtccagatatcagctgttgtgcaagtgtatgaccgtcatctgcagacaggcttctagatgacaccaaggatgcatcacccctcagccccagactccatttactttgatttgctttagtctctgaggaatgaaattctttctcaaccagggcccagtcatttttatgaattctgacaccctcaaatcaaaggtccctcttttctctgcatgtgattcagggatagaaatgccctctccatgactgagctccaaatggagaagtgctaagatacggaggaggcagctcactaatggaatataaagcaaagtcttgttggtggaaaagagtgtctccactttttgtggtgtccccctcctctattttccttctgtcttttaaaatgagaacagtgctagactcccaagccaacctgccttaatcagtgtgcacacattgcactgttgctcacctctgaggcaaaaacccgagaggaggccgtctttctgtctttgtctagagggtcgatttgtaacatctgaagaaatcagtctgtcctgggtttatctgcctactctcctgctccccgcagctggagtcagctgtcctgtctgattctgctccctgaactgtattgcagtggcttccaattgcctggagaattctgctttagccctgtggtgcttgaacttccaggactttgaaaaacttggatattgggggctggagagatggcacattgtttaaagaattggctgttcttccgaaggacttaggttcaattcctagcacctgtatggtggctcataagtgtgtgtaactcaattccagtggatacaactccctcatacaaacatgcatgcaggacaccatatgcacattaagttaaaaaaaaaaaaaa

SEQ ID NO: 245 - DNA, 1502 bp, Mus musculus
tggttgctgagagagccccgcggaatagctgagcttcgccatggccctgctacgaggtgtgttcatcgtcgctgcgaagcgaacaccctttggagcttacgggggccttctcaaggacttctctgccaccgatttaactgaatttgctgccagggctgctctgtctgctggcaaagttccacctgaaaccatcgatagtgtcatcgtgggcaatgtcatgcagagctcttcagatgcggcatacctggcgaggcatgtgggtttgcgagtgggagtcccaacagagactggggcccttaccctcaacaggctctgtggctctggtttccagtccatcgtgagcggatgtcaggaaatctgttctaaagatgctgaggtcgtcttgtgtggaggaacagagagcatgagccagtccccctactgtgtcagaaatgtgcgcttcggaaccaaatttggattagatctcaagctggaagatactttgtgggcaggattaacggatcaacatgttaagctgcccatgggaatgactgcagagaaccttgctgcaaaatacaacataagcagagaagactgtgacagatacgccttgcagtctcagcagaggtggaaagctgctaacgaggctggctacttcaatgaggagatggcacccattgaggtgaagacgaagaaaggcaaacagaccatgcaagtggacgagcacgctcgaccccaaaccaccctggagcaactgcagaagctcccgtccgtgttcaagaaagacgggacagtcacagcagggaacgcctcgggggtgtctgacggtgctggggccgtcatcatagccagcgaagatgctgtcaaaaaacataacttcacgcccctggccagagtcgtgggctacttcgtgtccggatgcgatcctactatcatgggtattggtccagtccctgctatcaatggagcattgaagaaagctgggctgagtcttaaggacatggatttgatagacgtgaacgaagcttttgcccctcagttcttgtctgttcagaaggccctggatcttgaccccagcaaaaccaatgtgagtggaggcgccattgccctgggtcacccgctgggaggatctggctccagaatcaccgcacacctggttcatgagttaaggcgtcgaggtggaaagtacgcagtgggatcagcttgcattggaggtggccaaggcatcgccttgatcatccagaacacagcctgaaggcatcacaagcacactgcccacacttactgggccaggccacggaacacaggagaccttcgagtcagccctgctgagacagtgattgtatgtgaccaagccttgatgaggcaagatgcattgggttctgtctacttcatacctgtctgacgtgttagaataaaaacaccaaccatcggaggccttaagagaaatggtatctgtcagtagtcaccactgtatgccttccatggagtaatacaaactgaataaatgttgccttaactcc

SEQ ID NO: 246 - DNA, 4235 bp, Mus musculus
acgctgggcagtccgttacgctaggctgctaacatggctgcctccaggtggctgcgcgcggttctactgtttctgtgtgcctcggaccttctgttgctccctcctcctaatgcctacgcggcggacactccgggcgaggccaccccacctccacggaaaaagaaggacatccgcgattacaacgatgccgacatggcgcgacttctggagcagtgggagaaagatgatgacatagaagaaggagaccttccagaacacaagagaccctcagcacctatcgacttctcaaagctagacccaggcaaacctgagagcatcttgaaaatgacaaagaaagggaagactctgatgatgtttgtcaccgtgtctgggaaccccaccgagaaggagacagaggagatcaccagcctgtggcagggtagcctgttcaacgccaactatgacgttcagaggttcatcgtgggatccgaccgcgccatcttcatgctccgggatgggagctatgcctgggagatcaaggactttttggtcagtcaagaccggtgtgctgaagtcactctagagggacagatgtatcctggcaaaggaggaggaagcaaggagaaaaataaaacaaagccagagaaggctaaaaagaaggagggagatcgcaaaccacgtgcttccaaggaagacaatcgagctgggagcagaagagaagacctttagcaggtggcaagcttcccgccaggtaggcaggaccagatagcccctcgcagactggtggggcaggtggtgcaggaaactgcatagcagatgacattctcatgtcctctagaaatggtctgtgtatgaccatctggtcaatatcacagttaccgtataaaaggcttcccatgtgaaggcaggatttgtgattggtagtggactggcaagtcatgtctactgtggcttcacctgactttggaaacttgatgttttgtaccttttatttctcttgagtccatgacacccccagagtaccactccctcctcagtgcacctgctgtggtcccatggcctgttgtatctgtgtattacaagctcaagtcagacaagccttgagaagcttcaacttgactgaagcgcgggtattgattgttcagtgagtgaagataactgtgccgtatgggcagtgctgtgttcagtgagtgaagataactgtgccgtatgagcagtgctgtgttcagtgagtgaagataactgtgtcgtatgagcagtgctgtgttcagtgagtgaagataactgtgccgtatgagcagtgctgtgcgcccaggatctggacagcaaactcgttatgcagagtgggcagattcacgacagtgccgtccagaacttctcatcggttctggggaatctttgtctccccgtctcctggagttgaagagggaatgcgcttgttcatcgtgtgaggaaagaaggatgcttccactgagggcccacgttctgcatagcccaacaactataaagttggcgaggagggaccagcagagtcttgcataggagtggacctcatctacagtatttctaagcggtttcctttgatgaagtgcctaaacttgtgcttttgtatggtactctcatgatgtgctgctgttcacatctgtttctgctgttcataggttgaagcttcgctaaaagaacatttctatgaggatgccatttttaagaactcacattcttttaaaacctcagttgtggtttgaaattcgaaatagtacatgtacacgtacccggctagaaattgtcactgttaagagtgtcacagtgtgaagaattgccctaccctgctgccagtactttgtcccagtgaagctactgttggtcattggtttttcaaaaataaagtacaattaccagcttccagtgataggtatattctgtcctccagtgatgggtatattctgtcctccagttggtttccgttcatgtttctcttaccaagccacacctccctccccagctcagggcgtcctggacacaacctgctgagcctcttcaaaaagaagctttttttggtcctcgcaccttgtgacttgtgatgatctgctgctgtcctgtttgagggtgctgccaatctaggagaagctgggacagggcactcatccttttggtatctgtgggcccagcaaatctgaaacaagccccgttcctggggtttttctgttttcacatggggcagttgattggctactgtcatgtctagccatgatgctcttttctcagggctgccgtttccttctggaagccttcatgatgctgacacgggactgtcatggctttgagtgtggtgtgcagcctcttcaccaggttcatgcatcacctgtgatgtagttgtcactggtgggttctgaggacagtgcaggcatggcaggaatgactgactgtgaggagaaaggaagaaatgcataatgcagtgaactgaatgggcagagctttgttgggaggtcaagggagttccctttgcaaaggccctgaggctagaagtagtagacaagggtgctcttggaggcccctgaggagtctggactggggagtgaggactctaggaggctgttggaattttgagtgcctcagggattttgcgtagtactgacaggagagcttctccggactcaggcctttagtcagtctctcgggtttacaggcagagaggcttgaagcagccttcggttcatgctttctgctgtttctgatttctggctgtgtattctgagctgggataaacagattctcctctccaaacacttatttgctactagaaacgaaattggcacattaagcctccttttattacagttcaagaatttgaactccagattgatcgatttaccctccctgatttttgacagtccctaaactgcctcgtgttgtcacatttcttcaaattcttgggttcgagtttctaaaacacaagaagccaggaggccctactgctgctttttatgagtcaaatcaagtagaatgaaagtctattaaagtcacttgtacccagactacagattccttatagtggtactaaggaggaaaagcaggtatggtgttgaatgcctgtaatcccagtgtttgggagggagagatgggaggatcagccaggccaggttacttagttgcaggatagcctcagctacgtctgaaactcacgctccccatgctcccccccccccaaaataacccccaaaacaaaaaggactaaatgcaaaagaaactagtcacaattcttggtgtatggccttttcttcagaggagccctcttagcctcctccataaaattaccagcagggaaggctaacactgccatcattgcactgtagtctcctgttctcaggaggacggcccctgttacagcaactgcaggggcatctggacagcacaactgcttcagtccagtgtcccctgggaccactggcttctagctctctttcaagtgaggacagtctgctccttggccagccatctgtccatggggaagctacctcagggctcctgggagctccaccactggaaatcgtttctgagcagacctcatgcaagcccccctctctgaatttcctagggaatttcaaaggacttttatttgtttggggggggcggcagtgggaggagctgtgttaagtctttggaatgagtatgcagaagtttctgaaagatgctccaaagtagccctcccccaaattatatatccctaaaagtgctttaacacccaaacttacctgtaagcccaacactgaggaagcagaagcaagatcagaagttccagatcagattgtattacatgagacactcaaaatgagacgaaataagcaaaacactaccactaacaacaacagaaacaacctatgacctaggtctgaatgttggtttttcttttggcttagaacaccctatgaagaccaggctagcctcactggagatccacctgcctctgtctcttgggtattgggattaaaaggaagcccatcttacccagcctctctggacattttcatatacagtattttggtaaacttttttccattcaaagggtaagttgtttacagtataattgttaaaatttaacatttggtatatattgctaaatagctgctcctgatagttctgtcatttgagacttcccagcaggtctgtgatccttgacagccttggccatcacatgtggcatttccaacaatttaaaaacaaagcctctttaaaaaaaaaaaaaaaaacaaaacccc

SEQ ID NO: 247 - DNA, 4748 bp, Mus musculus
ggagggcggacggcgcgggtacttaggagtgcacgggagaggccaggagcggctccgtttggcttggtggctgcaggcccaggctgtcgcgctgcgctcggtgagtgcaggatccagcatccaggatgtggtggtccttgatccttctttcttgcctgctggcactgaccagtgcccatgacaagccttccttccacccgctgtcggatgacctgattaactatatcaacaaacagaatacaacatggcaggctggacgcaacttctacaatgttgacataagctatctgaagaagctgtgtggcactgtcctgggtggacccaaactgccaggaagggttgcgttcggtgaggacatagatctacctgaaacctttgatgcacgggaacaatggtccaactgcccgaccattggacagattagagaccagggctcctgcggctcttgttgggcatttggggcagtggaagccatttctgaccgaacctgcattcacaccaatggccgagtcaacgtggaggtgtctgctgaagacctgcttacttgctgtggtatccagtgtggggacggctgtaatggtggctatccctctggagcatggagcttctggacaaaaaaaggcctggtttcaggtggagtctacaattctcatgtaggctgcttaccatacaccatccctccctgcgagcaccatgtcaatggctcccgtcccccatgcactggagaaggagatactcccaggtgcaacaagagctgtgaagctggctactccccatcctacaaagaggataagcactttgggtacacttcctacagcgtgtctaacagtgtgaaggagatcatggcagaaatctacaaaaatggcccagtggagggtgccttcactgtgttttctgacttcttgacttacaaatcaggagtatacaagcatgaagccggtgatatgatgggtggccacgccatccgcatcctgggctggggagtagagaatggagttccctactggctggcagccaactcttggaaccttgactggggtgataatggcttctttaaaatcctcagaggagaaaaccactgtggcattgaatcagaaattgtggctggaatcccacgcactgaccagtactggggaagattctaatctgctttgacttcattgtccagtccttagggcctttttccaaaatttagcggccctggcagggaatgaggtagacaggggagtctttgattctttgagttcatctaacatgcatgaagcttttggcaagatttggacgactggaccagagctgcctgccatcagagctaccctccaaacactgtccttacctggcctcctcctagcccatcccacgacagtgatcacagtctgcatcctagcctctccctagactagtgcggtttgaagtgcctgctgttgtggctctgctgccatacctcccacccccatccccatcccagcatccgaggacccaagggctttgactgcaggacttccaaaagaacgaacattcacgagaggacaaatgccacctctcagctgcatcttgaagctggtacttctgggcttgtggcaggcattcgtcaatggcccagtgcagttctctggagaaagctaccttttcccaaggcatctgcatccatcgacattggtaatgtggccagctctccttggtcctgtcctcagccgatgctttttcaataggatttttatgctttgtgtacctcaaccaagtatgaagagctgtactggttttatagactcacccccaattgtatggcttaaaacaagctacatggtcatggtttgctgtgtgaccgacagataaccacaatgaaactagtctggaaaaaaaaacttgctttttgttgtagttaccacttaaccctgtagtttaacaaggaatgtctgtgccaataaaccaattctccctctgcttgacattggcagggcggcaacggttctgtgctgcagtttcaaggcttttgtctctggccctggtttcctgtcaccctcagaaatggttctcaaaccgtacctgtaactgctcacacctcggagcacttcctcctgcttagagataagggagctacacttgtttaattaaccaaggcgggcactcacatacatatgacccggactgccatcttcttagaggtcatttcctggagtgggggccaaagcttgcgcaccatgtttaagttttctgggttactggatttcatggattttcatggattttaccaaaaatcatagtgaagtacagttcaaagggaacagggagcctcactcatcagcgttgtcctatggatctgttacttcctgctaagtgagagggaggggctggtttctctggaagcccgccttcccatgtcggcaatcagaactatatcaaagaagctctggatgcctggcgagtgctagaagtgtaactcggtttgaggcaacctggcttgggtactggggctttagtactgcaagacagttccaccggtctcaactacgcccaatagttccctcctacgcttcctttcttgcctcaccacatgcccacctgcaactccctccctacctcgcatagccagtgaagatgagctaaattaagagaagaggaccctgaacatcctctgatggagcccaggaaacccgttttgttatcgtatgcttgggggtactctagatgtcttccataaccagattctcctgttggtgggtttcctgtgctcaagtcaagagctgtcttccttggtacatgaaatggatactcaggagacagaggcaagccagtctctgggagtttgaggccagactggtctacaatagaccttgaagctaggagcatttccttttcagcctgccacagggccttttgatgattctgtgtttacacatccctacctttctacacattagactagaacacgccgttgtgtgttctttgtgtggtcctcaaacctgagccagtatgagtgccaggcctttgaatagtcgtttgtagcccgactaggtcatttcagatagatttgggcgatggccttcaaacagggcctatgacagacagcattcatgctgcccaggaactcattaggtaacatgccagatcaacttggtcagaagtcttgttccagatccattagaatacagaactagccttagcgctctcacttccactaccacagagcctgggaaactcaacagcagggggaacgccttcaaagggctgtcccagacaggatttgcaaataaccagaggaaggtagcaagcacatctttctaataattatgtctgatatgggtgggcctctgagaagcacacagatggtgtaaattatattgagagtcaaaagcaggcctagggatgtctccatggtagagtgtttgtccagcatattgtccaagccaagacccttggttccagtgcccagccaaccaccaataaccaggagaaagaggtgtgtcatatgtagacagtatgtataatgtccgactaaatgtatttctagataatggctttatagaaatgcaccatgctaaatatctgaatataaagaaaactatctgaaattcaagtggaacttggggtcttatttgctaagggaaataagtttcagggggttagagtctgtcccccctacccctttatatttattcatgcagtttatgagtactctgtcttcatgcacatcagaaggaatcggatctctattatagatggtagtgagccactatggggttgctgggaattgaacttaggacctctggaagaacactcaggtgctgagccatctctccagcctccaggttttgatgttagagacagtgtcttatgtagtccaggcccacctccacaactgaggaggatcttaaaatccaactcctcccttcctccatggcctccctccacctcccacatgctgggattactggtaagagttgtagcttccagaaaggatgaacattaaacttcggtttcagcggggtcggtatttgttcaaggcttagagcaagtgaccaatgaagtctccatgccccagtaatccagcaaggaatctgtgcttacaaagttgaatggaccactgaactggccgaggcacctcagtgatgaagtcaacatacgcagcaggcttaagaggggagcagactatgctctacatgtctctgtggtctgagcgtacccaaagggtcatatacaggttcacaaaatgacaggtagctgaggcactgttctcaaaaggctcaatgctagtcttccagagttagggctccagagaccaagctctgtggacaacagtggggtggctcgtgcctataactcgtacattcagaaggctgaggcagtgggatcaccattaaattcaaggctacatagacttgcaggccaacctgagctacagttacagtgtacaagtgtcagcatgccagggcgtcgactcctgcttcctgtcacgtgctctctcctgcatgtcctctctctactgtagtgtcatttctcacaaggccgtccaagggctaaagatggggcccccctcatcttgtactttcatcctcctaagctgttacataaacaatcctctttccttggtaaagcagttggcctcaggtatcttgtcctaccaggtcaagagtggttgcctagagcctctccaccgctcaacatggtttcagatacacagggtgtcagaggccaccatgacaatgtagccaactaaccacgctgcaattaaaaacctaccaatatag

SEQ ID NO: 248 - DNA, 2961 bp, Mus musculus
agccgggctccgcggatccgctccccaagctccgggtctcggagcagagaaacgctccgagtttcggggtcctccctgcgcctggcgcccagaacttcccggagcgcggcccagaccggggtagagggggaggggaccaagcgtcctggccgcgggaaggcgggatgccagagctgcgaagtgctacgcgccgctgagccgggaaccgaggagccgccggccgcacgactgtctgcaggcgcctagcaccatgcacccccggcgccgcgcgctcctgcagcttcgccgcgtccccccggaacggcactgagcgcctccaaccgtctaccggacccggacctgcgtcgccgcgcttctcagggagccccggccgcggtgccggagcgaacacccgcctttaccagccgcggggccgccggcatggatggatgaggacgcccatgccagaagtgcgcggaactcggacaaacttttccagcggccccgcggccgccacccgagcctcgtctccgctccgcaccgcgtccggcggccgctgctgcccgcgatgctagccgcgctgctgggcggcgccggggcccgcacggggaccttgccgggcgccttgctgtgcctgatggcgctgctgcagctgctgtgctcggcaccgcggggctcggggctagcgcacggccgccgcctcatctgctggcaggcgctgctgcagtgtcagggcgagcccgactgcagctacgcctacagccagtacgccgaggcttgtgcgccggtgctagcgcagcgcggcggggctgatgctccggggcccgccggcgccttccccgcctcggccgcgtcctcgccgcgctggcgctgcccgagccactgcatctcggcgcttatccagctcaaccacacgcgccgcgggcccgcgctggaggactgcgactgcgcgcaggacgaacactgcaggtccaccaagcgcgccatcgagccctgtctgccgcgcaccagcagcgtgggcccgggcgcgggagcgggctcggtcatgggctgcactgaggcccggcggcgctgcgaccgggacagccgctgcaacctggcgctcagccgctacctggcctactgcggcaagcttttcaacgggctgcgctgcacagacgagtgccgcgcggtcatcgaggacatgctggccgtgcccaaggcggcgctgctcaacgactgcgtgtgcgatgggctggagcggcccatctgcgaatcggtcaaagagaacatggcccgcctgtgcttcggcccagatgcgagcaacggtccgggcagcagcggctcggacgggggcctggacgactactacgacgaagaatatgacgacgagcagcgcgctggggccgcgggcggcgagcaacccctggacgacgacgacggccttgcgcgcccgggcggcggcgctgctgcggcgggcggccgcggagacttgccccacggtcccgggcgcaggagcagcagcagcggcagtggaggccactgggcgaatcgaagcgcctggaccccgtttgcctgtttgctgctgctgttgctcctgctgctcgggtcacacttgtagctcctgcgcccctgctgcaggctgctccaggccggtatgcacgacccagctggttcccgagcagggcacctgtggctcggagaccggagatggtcgggaacactgacccacactcttcctgggtggacagggcccagctcgtaccgcagccaacatgttcggccctcttctgtgcggttttccaggctgcagagataaccggctgatctatactgccagctctaatctgcagaattcgggacaccctgcaaaagcaaaggaggcctagactcagagtgctgaacggtgggggtctttcaagttccaatggacttggagaagggatgttgagggaattaggtttgcaaaggggccgggtttttatttgtctgtttgttttgtttttaaactgttttccggtgagggaacacatagtactggtaacgacttaaattgcttgtgaccactgagaaacacagcaatcgtaagtaaatagaaaagttccccttaccgattcattcctgtgctcttggtgtatctatccatcggtaatgctcagtgtggagctggcgattgcctttgggggggggaggggcttccccgaaattacaactgcattatattcctaacccttcacctttaattttcctgccaccattctgatccctctgcaccacgtgtcttagaattaaggatccaaaagaagaaaaaaagttaccatggtgttgaacaatgcatgttttttatcctaaagctcggtactgccatctaggaaaacctctatgatgtttgttctgttgtcctttttttttttttccctccaccaagaaattctaaatttgaatatgcagagattgaatattacctctgcccctatcagggtcttccaccctggtacgtcgtatataaactgtattaaaactggggtttcttaccagttgctgtactttgtatatagaattttttataaattgtatgcttcagaaaataatttatttttaaaaaaagaaattaaaagttttaaatctgcatcattgttgtatctcccctatccaagaaatgtatagaatacattggtcatgaggaatccactcctgcagcccatccaagaaatgtatagaatacattgctcaccaggaacccgctcccgcagcccattttgaaatgtgccctgtgtagaagaatgtacagtgtattttacagatttgaagtaacgttcttattttcaagagaatttatggacattgtagaaatgtataaatgcatttccaaactgccttaaacattgtatttttatagacatcatttttttaaatcccgtgtttaaaaaaaaaactatgactttgtgtatttttggttgttttattaaaaatgcacacaccagtaaagagtttaaacagtga

SEQ ID NO: 249 - DNA, 1863 bp, Mus musculus
ggcacgaggcggacgagcgggcggcggagccatggcaggctgctgctccgtgctccgggctttcctgttcgagtacgacacgccgcgcatcgtgctcatccgcagccgtaaagtggggctcatgaaccgcgtggtgcagctgctcatcctggcttacgtcattgggtgggtgttcgtgtgggaaaagggctaccaggaaacggactctgtggtcagctcggtgacaaccaaagccaaaggtgtggctgtgaccaacacttctcagcttggattccggatctgggacgtggccgactatgtggtcccagctcaggaggaaaactccctcttcatcatgaccaacatgatcgtcaccgtgaaccagacgcagggtacctgtccagagattcctgataagaccagcatttgcgattcagacgccaactgcactctcggctcctcggacacccacagcagtggaattgggactggaaggtgtgttccattcaacgcgtctgtgaagacctgtgaggtggccgcatggtgcccagtggagaatgacgctggtgtgccaacgaggaatatcctccccaacattaccacctcctacctcaagtcgtgcatttataatgcgcggacggatcccttctgccccatattccgtcttggccaaatcgtggcggatgcgggccacagctttcaggagatggcagtggagggaggcatcatgggtatccagatcaagtgggactgcaaccttgacagagctgcctcccactgcctgcccagatattccttccggcgcctcgacactcgggacttagaacacaacgtgtctcctggctacaatttcaggtttgccaagtactacagggaccttgctggcaatgagcaacgcacactcaccaaggcatatggcatccgctttgacatcatcgtgtttggaaaggctggcaagtttgacatcatcccaaccatgatcaatgttggctctggcttggcgctcctaggggtggcgaccgtgctgtgtgacgtcatagtcctctactgtatgaagaagagatactactaccgggacaagaaatataagtatgtggaagactacgagcagggtctttccggagagacggaccagtgatgcctaaccctacatttcaatcccactcagcctgtgatgcagaaatatgggagacttggctgctgcgtctgtcactctagagacggttccagagtctcactcggtctccactccacaaatactcagggttgcccgagcacgtcttgtattgtttttttgtgggttttgagcccgggtcctgctctgcagctcagatgggcttcagattcaagatcctcctgcttcaacctccaggggtgctggaatcccacacgtccataacagcacccacttcccacgggagttccggcatttttacattttacaggttcattgtacacatctcaggctggcctcaaactccaagacatccaagaaaccctattaatctcattgtggatatggggggggggtcatttgcacacctacacacaatggatttctggtgtgctgttggctgggtcacctgttgcttatacaatgtgagtgtactgaggtaaggggaatatgggagcagagacacggctgtggcttacggacaggcccagtccttggaggcacagcagctctgtccaagcactttataaggaaggaggctcccccaggtgccgtcaggaggcctgggatactattcctcttccctatgaccagagaagttgtcctcggaacaaaggcagggttagcttttcctttcataagggctgtgttgaaatgacctaggaccaaacattaaagaaaataatgtttttaaaaaaaaaaaaaaaaaa

SEQ ID NO: 250 - DNA, 1758 bp, Mus musculus
  modified_base (998)..(998): a, c, g, t, unknown, or other
cggcacgaggggcttcctctccacccctagggcctgcgggtctcagcggcgcccaagctccagtctagcgtcctggggcagtggcctccaccatggcgttgctgggcaacttcctttgctgcctactggttgcctggctctgcggcccggggctcggggtgcccctggcgccggcggatcgcgccccagctgtggggcagttttggcacgtgactgacttacatctagaccctacttaccacattacagatgaccgtaccaaggtgtgtgcttcatctaaaggcgcaaatgcctccaaccctgggcctttcggagatgtcctgtgtgactctccatatcaacttattttgtcagcctttgattttattaagaattcaggacaagaagcatctttcatgatatggacaggggatagcccacctcatgtgccagtacctgaactctccacaggcaccgtgataaaggtgatcactaacatgacaatgactgtccagaacctgtttccaaacctccaggttttccctgcactgggcaatcatgactactggccacaggaccagctgccaatagtcaccagtaaggtctacagtgctgtggctgacctctggaaaccctggctgggtgaagaagctattagcactttaaagaaaggtggtttttactcacagaaagttgcaagtaatccaggcttgaggatcattagcctaaacacaaacttgtactatggcccaaacatcatgaccctgaacaagacagacccagcaaatcagtttgaatggctggaaaatacactcaacagctctctatggaataaggagaaggtatacmtcatagcgcatgttccagtgggctatctcccttatgcaactgacaccccggcgataaggcagtactataatgagaaactgcttgatattttcagaagatacagctccgtcattgcgggacagttctatggccacacccatagagacagccttatggtcctttcagataanaacgggaatccactcaattctgtgtttgtggcacctgctgttacaccagtgaaaggagttttacaaaaggagaccaacaatcccggtgtccgcctatttcagtacaagcctggtgattacacattgctggacatggtgcagtattacttgaacttgacagaagccaatctaaaaggagaatccaactggacattggagtatgtcttgactcaggcctacagtgttgcagatctgcagccaaagagtttatatgccttagttcagcaatttgccaccaaagacagcaagcagttcctgaaatactaccattattattttgtgagttatgacagcagtgcaacttgtgaccagcattgtaagaccttacaggtctgtgcaattatgaatcttgatagcatgtcctatgatgattgccttaaacagcatttataaagcacagtcactagtattccagttgtgtttgtagaaaaaaaaaatcacatcatggtgctcctgcgatcagcttctgaagtgctgggagcataggaagattgacattctgtgtgacttgtgaggctcagatgctgataccagtaacattcaaaattaacttcacgcattgaatacatttaaactgttcattagcggagtgatatttggacataaatatctcgtcttccaattttatgtaattatacctaacttatacccttgtaaaacttgtcatctatgcaataaagcagttgatttttctgtggaaaaaaaaaaaaaaaaaaaaaaa

SEQ ID NO: 251 - DNA, 699 bp, Mus musculus
cccacgcgtccggacagagggcgcctctgtccactcctggcccttagccctttgggtgtcgtttgtgaaggggtggagcctggggaggaggtcggtagggaaagacgactaaaagacaggtctcctcacaccggtccagtggccacatttgcagcgtgcccttctgtcgagaatctgttccgacgtcaggccgaggccaaccgtgtgctgctgaaatgggctctgagctggagagtgccatggagaccctcatcaatgtgttccatgcccattcgggcaaggaaggggacaaatataagctgagcaagaaagaactgaaagacctgctacaaactgaactttctggcttcctggatgtccagaaggatgcagatgctgtggacaaggtaatgaaggaactggatgaaaacggagatggggaagtggacttcaaggagtatgttgtgctggtggctgctctcacagtggcttgtaacaacttcttctgggagaccagttgagcacagtctgtgagcagtgcccttcctctcccacttgtcaagatttcccctttagcgtgcttgctcctcaccccacctgtacctccctatgtccccatccttgcccagtctcgacgtgcaccaagggcacaagagtggcagtccagatctgccacttgttttaataaagccttctctctcaccaaaaaaaaaaaaaaaa

SEQ ID NO: 252 - DNA, 1948 bp, Mus musculus
cccacgcgtccgggaggaggtaggaggaggagacatcaggggtggtcctgggcgcctgggacacctttcccggactataaattgagcacctggaatgggcagggggcctgagcaaccacagtcgcccttactcacagtccgatcagtgaccgcagcagcgcccttgggcagccaccgtccgcaacgcaagcactgagaaccaggggatttcgcagtgcaagagaaaaaggctagacccagccacccaccgtcaatcctgagccaaagataagagcagccgggcctcacgaagggctgagctgagaaagaagcaagttagagagggcggagaaggatctgggaatcccgtcacaccggcttcaagcaggctcccggcatcagcctctgagagcgcttgaaggcggcatcgccagcggtctatctccgtgtaccagcgtccctgtgtttccgcgcccgctcggccaccatgatgcaaatctgcgacacatataaccagaagcactcgctctttaacgccatgaatcgcttcattggcgcggtgaacaacatggaccagacggtgatggtgcccagtctgctgcgcgacgtacccctgtccgagcctgagatagacgaggtcagcgtggaggtaggcggcagtggcggctgcctggaggagcgcacgaccccggccccaagcccgggcagcgccaatgaaagctttttcgcgccctcccgggacatgtacagccactacgtgctcctcaagtccatccgcaatgatatcgagtggggagtcctgcaccagccttcgtctccgccggccgggagcgaggagagcacctggaagcccaaggacatcctggtgggcctgagtcacttggagagcgcggatgcgggcgaggaagatctggagcagcagttccactaccacctgcgcgggctgcacaccgtgctctccaaactcacccgaaaagccaacatcctcaccaatagatacaagcaggagatcggcttcagtaattggggccactgaggcgggggctgtccccgctgcccagcaccctctctcgggtcggctctaccacccctctctttcctccaagctattttcttcctggttgtggggcacgaagggcacactgtaaagttgggctgtgtacttggtggggttagtgtggagaagagggcctcatcgcgagagcagaggaaagtagtcgccagagaggggggttcaaagacccccggagggggcctactctgtgttggtgggaatggaactgggccgatgtccttcattcagcctgtgcctttcttggggtttcttttctgtttttctttccggaagagaagggcctgagaaagggccatgccagggcacagtgctgggttgccacacatgggagggcagcttctagccgggtgcttgggggaggcggggctcagcctcctgctgccctgccttgagctgccagaggaggccttggcgttgctaggattgcgtcagttttcctgtttgcactatttctttttgtaacagtgaccctgtcttaagtctttcagatctctttgctttgaaacttcgtcgattccattgtgataagcgcacaaacagcactgttggtaaccggtactactttattaatgattttctgttacactgtacagtagtcctgtggcaccctatccctttcacgccacccctcccccgcccgtgtgtgtaaactggcgatgtgccagctaggatgaagcttgccactcggctagcgaaaataattaacgttattatgagaaagtggatttatctaaagtggaaccagctgacattatatctgtatcgtatggagaatgatgaagggctccactgttgttatatgtcttgtttatttaaaactttttttaatccagatgtagactatattctaaaaaataaaaacgcagatgtgttaactaaaaaaaaaaaaaaaaa

SEQ ID NO: 253 - DNA, 1893 bp, Mus musculus
ggccgccgtccatcccgccatggctgcgcgcctgctcctccgctccctgcgcgtcctgagcgcccgctcggcgccacgcccgctgccctccgcccgatgttctcattctggagcagaagcgcgtctagaaactccttctgctaaaaaattaactgacattggaatcaggagaatcttttcctcggagcatgacattttccgggagagtgtaaggaagtttttccaagaagaagtgattcctcaccacacagaatgggagaaagctggagaagtgagtagagaggtctgggaaaaagctggcaagcagggcttgcttggcatcaacatcgcagagaaacatggcggcattggtggggacttgctctcaacagcagttacttgggaagagcaagcgtactccaattgcacaggccctggcttcagcctccactcagatattgtcatgccctatattgcgaattacggcacaaaagaacagatcgagaagttcatcccccagatgacggcgggcaagtgtatcggtgccatagccatgacagagcctggggctggaagtgacttacaaggagtaagaacgaacgccaaaagatctgggagtgattggattctcaatggaagcaaggtgttcatcactaatggctggttaagtgatctcgtgatcgtcgtggccgtcaccaaccgtgaagctcgatcgcctgcccatggcattagcctctttttggtggaaaacggaatgaaaggatttatcaagggccggaagctgcataagatgggaatgaaagctcaggacacagcagaactattctttgaagatgtccgattgccagctaatgccttacttggagaagagaataaaggcttctactacctcatgcaagagcttccacaggaaaggctcttaattgctgagttggcgatttctgcctgtgagttcatgtttgaagaaaccaggaactacgtgaagcaaagaaaagcttttgggaaaacagttgcacacatacagacggtgcagcataaactagcagaattaaagacacacatatgtgtcaccagagcttttgtggacagctgtctgcagttgcatgaaaccaaacgtctggactccggttctgcttccatggcaaaatactgggcatctgaattacaaaacagtgtagcttatgaatgtgtgcaactccacggaggctgggggtacatgtgggagtacccgattgcaaaagcttacgtggatgctcgggtgcagccgatctacggtggtaccaacgaaataatgaaagagctgatcgcaagacagatcgtcagtgacagctagacatctgcctacatcctggaatcctattacatgcagctaatgcggattctaatctacttgagataaagtgtaacctggaaaagggggggaaatggtaaagctggttttatgtatgattgttacagagaaagaaataaaatagaattctaaagattaacacagggagagagaaatttttgagcccaagagtctaaagttttgtcatgaaaggtataaccttttttcatgcatatacagtgaatataaaagattttctaactgaagagccttttaatgtcttacttgtctttcaaattctgaagagcataagttggctttcattcttaaagttgaggcagaatttaatattaataatacttacaagactttggaaaggtcaaataattgtaacttatatgaagtcatttcagctactttttgctccatattcccccaggacattggttcccaccatgttacccccaaccccatgttttttaaagtaatgaacagaacccttcagaaaaaagtggaccgtactgtatataatgcacatagaggcaattgtgtatcaatattaaaaataaagtaaaacttaaagc

SEQ ID NO: 254 - DNA, 2273 bp, Mus musculus
gagcgattgccctgtcggtcccggagcagcccagcccggcccaggtgaggggcgggacggccgggcgatttggggttgcgcattggccaagggggaacggatcgtccaaagcttggggtcctgacacaggtgggcagtgaaagatcggacttggaactgtcacttgcctgggttccctggagctgcggtctagtacgcggactgcctggtaaaccctcacaggtcctctgtggtgcacacagcccacctcccagccatgcgctctctccttctgggcaccttatgcctcttggccgtggccctggcagccgaggtgaagaaacccctagaggcggcagcccctggtactgcggagaagctaagttccaaggcgaccacactggcagagcgcagcacaggcctggccttcagcctatatcaggcgatggccaaagaccaggcggtggagaacatcctcctgtcacccttggtggtggcctcatccctgggtcttgtgtcactgggtggtaaagccaccacagcgtcgcaggcgaaggcagtgctgagcgctgagaagctgcgcgatgaggaggtgcacacggggctgggtgagctgctccgctccctcagcaactccactgcgcgcaacgtgacctggaaactgggcagccgcctgtacgggcccagctccgtgagcttcgccgatgacttcgtgcgcagcagcaagcaacactacaactgcgaacactccaagatcaacttccgagacaagcgcagcgccctgcagtccatcaacgagtgggcctcgcagaccacggacggcaagctgcctgaggtcaccaaggatgtggagcgcacggatggggcactgcttgtgaacgccatgttctttaagccacactgggatgagaggtttcaccacaggatggtggacaaccgtggcttcatggtgacccgctcctatactgtgggtgttacgatgatgcaccggacaggcctgtacaactactatgacgacgagaaggagaagctgcagatggtggagatgcccctggctcacaagctctccagcctcatcatcctcatgccccaccatgtggagccgctcgagcgcttggagaagctgctgaccaaggagcagctgaaggcctggatgggaaagatgcagaagaaggctgtcgccatctccctgcccaagggcgtggtggaggtgacccatgacctgcagaaacatctggcaggactgggcctgaccgaagccatcgacaagaacaaggcagacctatcgcgcatgtctggcaagaaggacctgtacctggccagtgtgttccacgccactgccttcgagtgggacaccgagggcaacccctttgaccaagacatctacgggcgcgaggagctgcgcagccccaagctgttctatgccgaccaccccttcatcttcctggtgcgagataatcagagcggctccttgctcttcattggccgcctggtccggcccaagggagacaagatgcgagatgagttgtagagtccaagagtgggcgtggcacggcaggaagtagccaaaggttcctgagacacatgggtgctattgtggggggagggggaggcaccaaccctggatattccacgggtgggggggggttggcagtgcaaaccggaattcccatatgtctgagtgggtatttttagacagaatccactcctaagttaggacatggagcccagatactatgataccaaattcaggggtgtcacagccattttgttctgccctgcaagttttagatccaatctgcctcaacagtcaatcagtgttcatatttatggccaggcattttatctgttagacaatcgagttgggggtagggcagcctagctctttttgtcaccatgccccgagccctcctcagtcttcctgttcacccctcccccagctccctttaaccgcaaaactaggtgctgtggccccagaactgcccatccttaaaatgatccttgcccagcggtgggagctggagacagcgcatggagggggctccctggcatacctgccctagaactgttatgttgggcatcacagtcatgaacttttgtttttctcccttttttagttttttcaaagatggggggaggggaaatatgagcctttgttgctttcaaaacgagaacagtttgtacaagtttttttttgaataaaacttttccaatgaaatgttacaggtgtgtgaaagcagattaaagaaagaggttcccatatcattctttctaaaaaaaaaaaaaaaaaaaaa

SEQ ID NO: 255 - DNA, 386 bp, Mus musculus
  modified_base (354)..(354): a, c, g, t, unknown, or other
acgtagcgcatccgcttgccgggaggaaccaagctacggcggctgctggactggatatggaccctgagacctgcccctgtcctactggtggttcctgcacctgctcggacaaatgcaagtgcaagggctgcaaatgcacgaactgcaagaagagctgctgctcctgctgccctgccggatgtgagaagtgtgccaaggactgtgtgtgcaaaggtgaagagggggccaaggcagaggccgagaaatgcagctgctgccagtgaggacgacccagaccctcccacacagcctatgtaaatagtgctgggtgtccctggtggggcacaactgttgtcttccccccccccccccccncgccggctgcctgctccggggtgtgaataaat

SEQ ID NO: 256 - DNA, 1206 bp, Mus musculus
ggcgaattgggtacggagcccccccggagccctggcagccatagcgctttgcacagccggcttggagcgtgtaggacgggcacggagcagggttgcgttctctgaagtcgcagactgtaagatctggatatgtccttcatatttgactggatttacagtggtttcagcagtgtgctgcagtttctaggattgtataaaaagtctggtaaactggtattccttggattggataatgccgggaaaacaactttgctacacatgctgaaagatgacaggctcgggcagcacgtcccaacgctacatcccacttcagaagagcttactattgctggcatgacgtttacaacttttgatctgggtgggcacgtgcaagcccgaagagtatggaaaaactaccttcctgctatcaatggcattgtatttcttgtggattgtgcagaccatgaaaggctgttagaatcaaaagaagaacttgattccctaatgacagatgaaaccattgccaacgtgcctattctaattcttggaaataagatcgacagacctgaagccatcagtgaagagaggttacgagagatgtttggtttatatggtcagacaacaggaaagggtagtgtgtcactgaaggagctgaacgcccggcctctggaagtgttcatgtgcagtgtgctaaaaaggcagggctatggagaaggcttccgctggatggcgcagtacatcgattagcagcggccggcccacacacttccagccctcagagatccatcccccaacatgcataacttgaattcaatagacttttgttggtttcagaataggtgtttttagattattaatatatctacctgagtgggaattgcaaactgattcaagtttgaatatcacaatgttagctttctaattccacacagatagtttttacagtttctaaccccacatcaatccatcaccgtttataaagatcagcttcccatcagtacatttgaagcactttttaacgatgtgaaactacaaatataaaccatatttaaaagctcatcatgtgaaacttttatgtactttttggaaatagtttttcaattttagattgtctgcctatcttgtgtacagttaaaatccgcttatcagtgattgcatgatgccttacggtttccaagactactttttcttatgcaaacgtcatgcaataaaacaaactccaacact

SEQ ID NO: 257 - DNA, 1525 bp, Mus musculus
agctttaccaccagctccggcctcggctcaccttccagagccccttccccggagctgagctaccgaaggctttctctcccgccctcaacccagcagcaccgcagctccggggcagcccggccggccagcctccccccccacccagctcagccctgcccgagtcccccagtcatgaacctcttccgattcctgggagacctctcccacctcctagctatcatcttgttactgctcaaaatctggaagtcccgatcgtgtgcgggcatttcagggaagagccaagtcctgtttgctgtggtgttcactgcccgatatctggacctgttcaccaactacatttcactctacaacacctgcatgaaggtggtctacatagcttgttcctttaccacggtgtggatgatctacagcaagttcaaagctacttatgatggcaaccacgacactttccgggtggagttcctcgttgttcctactgctattttggctttcctggtcaaccatgacttcacccctctggagatcctctggaccttctccatctacctggagtcagtggctatcttgccacagttgttcatggtgagcaagacgggtgaggcggagaccatcaccagccattacctgtttgcactgggtgtctaccgtacactctatctcttcaattggatctggcgctaccacttcgagggcttctttgacctcatcgccatcgttgctggcctggtccagacagtcctctactgcgatttcttctacctctatatcaccaaagtcctgaaggggaagaagctgagcttgccggcataaccctggcctcaccagccttctctgaggcagggcaggaggcagaggaaggctgctggagaccgagagccttccatccagagctgactttgtaaagagctcgcctctcctggctccccacccctccagctgggttttggggttattggacgaccctgctcctggggagctcaggacctgagctgtttgtagccttttgccttttagagaagaaaaacaaaaaacaaatctttccactatttagtttttgattctgatgacttttttctcttctacctggccctgattttttataaactgtgttttgagtgttctctggatcagggccaggggaggtcgacccccttctccaaaatcccaccccagccccatggttgccaaacactacgtctgccaatatctgcctgcccaccttggctgtgacaacgatgctccttacatgttcctggattggtggtaagaaggaggaaagttaaggagggtctcctaatttttcatgattttttttcttccccagaatttgttagctttttgtgtgtggggtgggggaggggagggttgtcctgtttttgataaattaggggaagctatgggcttaggcaagggaaagaggctggctgacccaggtggtgacccagactacactctaacaccatgtttttgtacagaatttgatggctgattctttgttytcttgaaataaaccaagaaacctgtc

SEQ ID NO: 258 - DNA, 3769 bp, Mus musculus
actttgcaagagttagtgcagttcgctgtacccattcattgcccgcagtggtcgggaaggggatccagggactgcggcggccactcccggggcattggggccagaggagggccggaaagcgctgctgaccctcgtgggctggggaggtgacggcgtccatgcagctgtgtgccagggcatgggggctgcgcctgggccgcggagccgggggcggccaccgcctggctcggggcaccggcttgagttgggcgcagcgaagccgggacagcagcggcggcggtggcggtggcggtggcggggaccgcggcgcggctggggcctcgcgccttctggagcgcctcctgcccagacacgatgacttctcccggagacacatcggccccggagacaaagaccggagggagatgctgcaggcgctggggctggcgagcattgatgagctcatcgagaagacggtccccgccagcatccgcttgaagagacccttgaaaatggaagaccctatttgtgagaatgaaatcctcgagactctgcatgccattgcaagcaagaaccagatctggaggtcgtatattggcatgggctattacaactgctcggtgccccagaccattttgcggaacttactggagaattctggatgggtcacccagtacactccgtatcagccagaggtgtcccaggggaggctggagagtttactcaactaccagaccatggtgtctgacatcacaggcttggacatggccaacgcttccctgctggatgaggcaaccgcggctgcagaggcgatgcaactgtgccacagacacaacaagaggaagaaatttttcgttgatcctcgttgtcacccacagacgatagctgttgtccagactcgagccaaatataggggggtgcttgtcgagctgaagttaccccacgaaatggatttcagtggcaaagacgtctgtggggtgctgttccagtacccagacactgaggggaaggtggaggacttcacagaacttgtagacagagcccatcagactgggagcctgacctgctgtgctactgaccttttagctctgtgtattttgaggccacctggagagtttggagtggacattgccctgggcaactcccagagatttggagtgccactgggctatgggggaccgcatgcggccttctttgctgtcaaagaaaacctggtgaggatgatgcctggaaggatggtgggggtgacaagggatgccacagggaaggaagtgtatcgcctcgctctccagaccagagaacaacacatccggagagacaaagccaccagcaacatctgcacggctcaggcccttttagccaacatggctgccatgttcgccatttaccatggatcccaggggctgaagcacattgctaaaagggttcataatgctactttgattttgtctgaagggctcaagcgagcaggacaccaactccagcatgacctgttctttgacactttgaaggttcagtgtggctgctcagtgaaggaggtgctgggcagagcagctcagaggcaaatcaactttcgactcttcgatgacggcacacttggcatttctttggatgaaacagtcactgagaaagatctggatgatttactgtggatcttcggctgtgagtcatctgcagaattagttgctgaaggcatgggagaggagcggagaggtcttctagggtcttcattcaagagaaccagcccgttcctcactcatcaggtgttcaacagctatcactcagaaactaatcttgtccggtatatgaagaaactggagaacaaagacatctccctcgttcacagcatgatcccactgggatcctgcaccatgaagctcaatagctcctccgaacttgcacccatcacctggagagaatttgccaacatccacccctttgtgccgctggaccaagcccagggataccaacagcttttccaagggctggagaaggatctgtgtgagatcacaggctacgaccgagtctcattccagccaaacagcggagcgcagggggagtacgccggactggccaccatcagagcgtacttagaccagaaaggagagagacacagaacagtctgtctcattcctaagtcagcacatggaacgaatccagcaagcgctcacatggcgggcatgaagatccagcctgtggaggtggacagatacgggaacatcgatgtggctcacctcaaggccatggtggaccaacacaaggagaacctggccgccatcatgatcacgtatccatctaccaatggtgtatttgaagagaatatcggcgatgtgtgcgccctgattcaccaacacggaggacaggtctacctcgacggggcgaacatgaatgcccaggtgggaatctgccgccctggggactttgggtcagacgtctctcacctaaatcttcacaagaccttctgcattccccacggagggggcggtcctggcatggggcccatcggagtgaagaagcacctcagcccctttctgcccagccaccccgtcatttccataaagccaactgaaggcacctggcccgtgggcactgtcagtgcagccccgtggggttccagctccatcctgcccatttcatgggcttacattaagatgatgggtggaaagggcctcaaagaagccacagaaatcgccattctaaatgccaactacatggccaaacgactagagaaacactacagagtcctctttagaggtgcaagagggtatgtggctcatgagtttatcttggacacccgacccttcaaaaagtctgccaatgttgaggctgtggatgttgccaagaggctccaggattatggatttcacgcccctaccatgtcctggcctgtggcagggactctcatgattgagcccaccgagtcagaagacaaggcagagctcgacagattctgtgatgctatgatcagcatcaggcaagaaatcgctgacatagaggagggccgcatcgacccgagggtcaaccccctgaagatgtctccacactccttgacctgtgtcacatcctcctgctgggatcggccgtattctagagaggtagcagcatttccactgccctttgtgaaaccagagaacaaattctggccaaccattgcccggatcgatgacatctacggagatcagcacttggtctgcacctgcccgcccatggaggtctatgagtctccattttctgaacagaagagggcttcttcttagtcctccctcctacgttcaaagggctgacccgatgtctcttgctggagcatttgacaagcaaggatatttcttctcctttacgtggctcacacatgagttttatacgctgtatatttttataatctttcaaggtaatgtaagcacaattagcatggtgagtggcggccacctgctgtacggcaaggcagtggctgttcgtgttgccttgattgggagccatttagtttgccggatagaaaatgtggggtgcgctagcaattttaacattttaattcaagaagtttgcagcagtcagagcctatgctgggaattcaatagacattctttttgttccaaataagtcctcgtggactgtgccctctgtgggaaaccccagggcaaatgtttacattttatacactgaagaattctcctcactaatgtgcctgatctgtcacagcataagtgtcctcctttcactgtgcggacttttttttttatctgcttttattagtgtcctaataaaactgagtttgagtaaaaaaaaaaaaaaa

SEQ ID NO: 259 - DNA, 3291 bp, Mus musculus
gggtggagaagctggtgggcaaagctcagcctcaggtgggaaaagaggcctgagcctagctgctggcatgcggtgtgtgaacgggctgcagacgtttggctcgggtctgctagtgcgctgcctccacccctggcactgaggctgggagttgacgaaactccctcacctgtcggaacccggatctggcagcgggaagggggctggcagccagtgtctgctggttacagcaagcttggcaagtggccctgcctgcactagggcgccaccgccaaggaggcaggtgtgagactactctgcgacccagcctcttgttgctatcctttgtccccaggcaccgtcggcttggggtaggacttcaggcaactcctgcagccttggctgcaggttcgagacgctccgccccctcctgtcacatagagcggtcagtgctggaggaaccttccattccgcaaaagtctacgggttgaggttttcggaactttgcaaacagggactagctggccctttatttgcaagccaggccacacctgctgctagcctgcgacaccctacagtcccggagagaccattctagcagcagcaccgacgccccaacttttgattcgcggtgtgcgttgcctacctgggtacccagctacagtgtccggggacgcacatcttctggagacagcgccaatcacactgcccagttcgctcttctctccctcccaagcgcggggttgggtgcctgatcccggaccacacaagcgctcaggactcgcctgacctcggaactgccttcgagaaagcgttagcctaggagatccgagcctctttctccataccatagttggttcaggtggtttcctcttcaaaccttgcgtctggcgcggataatccgcgcggccgggcgttaagctccaggtccctgtcgctccgtcgaggtggcaagccatggccggctgctgctgtttgtctgcggaggagaaagagtctcagcgcatcagcgcggagatcgagcggcagcttcgccgcgacaagaaggacgcgcgccgggagctcaagctgctgttgctgggaaccggtgagagtgggaaaagcacctttatcaagcagatgaggataatccatgggtctggctacagtgatgaagatagaaagggcttcacgaagctggtttaccaaaacatattcacggccatgcaagccatgatcagagcaatggataccctgaggatacaatacatgtgtgagcagaataaggaaaatgcccagatcatcagggaagtggaagtagacaaggtcactgcactctctagagaccaggtggcagccatcaagcagctgtggctggatcccggaatccaggagtgttacgacaggaggagggagtaccagctgtcagactctgccaaatattacctgacggacattgagcgtatcgccatgccctctttcgtgccaacacaacaggatgtgcttcgtgttagagtgcccaccactggcatcatagaatatccattcgacctggaaaacatcatcttccgaatggtggatgttggtggccagcgatctgaacgacggaaatggattcactgctttgagagtgtcacctccatcattttcttggttgctctgagtgaatatgaccaggttctggctgagtgtgacaatgagaaccgcatggaggagagcaaagccctgtttagaaccatcatcacctacccctggtttctgaactcctccgtgattctgttcttaaacaagaaggatcttctagaggagaaaatcatgtactctcatctaattagctacttcccagagtacacaggaccaaagcaagatgtcaaagcggccagggactttatcctgaagctgtatcaagaccagaatcctgacaaagagaaggttatctattctcacttcacttgtgctacagacaccgagaatatcccctttgtgtttgctgctgtcaaagacacaatcctacagctaaacctacgggagttcaacttggtgtaaatggagggcctactcctccgagacagagggtgatctgagcccttcctgcctgatctacaagtgcttctggaccaggacctaaggacattatgtagcccacagggacagagatgggtagtgcaatgtgaaaaatacttcaccaacccttttaagtgtctttaattcttcactgtctaactcttttctcgccttttggttgaacgattaggtatcatttttgagtggttccccctctcctatttttaaactagtgttcaacagttattaaaaatcatgcaaaaaaattcatgcaacagagggacttgttaatttacaaatcatgccttcagacctctgagattcatttaggtgacttaaacatcttcattggtttgataattttaaaataaatcttttaagaaacttttaaaacatttcttccccttaatgttgaaatatgactcatgtaacaacttactaaaccaccaaagacttctttctatgccttttttttgtttgttttttaattttaaaaacagggtcttaagtagcccaggctggcttccaactcaaatttgctgtgtaattgagcatggcccttggtcctcctgcctggctgttccatgcttagctaagattttcttcttttctgagacagagcctcacatattcttttctggtctcagacatgctatgtggccaaggatgatgacactgggctttcggttctcttgtattcatatacacaacctatttaaggcagttctcacactgttgccaactcctagcattaagaggtctccaagagtgtgattgcacattgatatttacaggttagtaatgcttggatggatgtgtcacaggatcagttatatgatgcttgggatgggtcccgggcgttgtgcatgttaggcaaatgttctgccgaccgagctatatcccaaaccaaagatttctttaaaaagcagttctttccatgtcaactttctaatccaaattaatattattcaaacattgatttttgccacaatctgataaaaccaactttagatactgcatgtgtgtatgtcctaatgcgtatggccaggccttacagcttatggaatggctaaagcagaacttgttaacagatgtcatgtaaaccttgccaaagctctggtggcaatctccaatgtgttgtttgaactgtgcgcgctgtgcctttctggatactaagaatacactgttctaccctgaacaccaacgatgatgtgcttcttagagctcgtggctgatcgttctgttcaaaagaaaacgttagttttaacggtt

SEQ ID NO: 260 - DNA, 5257 bp, Mus musculus
ctccgagtcagtcactcgccgccggctcccggccctacggatcccagttttctgttgcccgcggtacgccgccccgctagccgccgcgatgccggtgtttcacacgcgtacgatcgagagcatcctggagccggtggcgcagcagatctcgcacctggtgattatgcacgaggagggcgaggtggacggcaaagccattcctgacctcaccgcgcccgtagccgccgtgcaggcggccgtcagcaacctcgtccgggttggaaaagagactgttcagaccactgaggatcagattctgaagagagatatgccaccagcctttattaaggttgaaaatgcttgcaccaagcttgttcaggcagcccagatgcttcagtcagacccatactcggttcctgcgcgggattacctcattgacggctctaggggaatcctttctggcacatctgacctactgcttacctttgatgaggctgaggttcgtaaaattattagggtttgcaaaggaattttggaatatcttacagtggcagaggtagtggaaactatggaagacttggtcacttacacaaagaatcttgggccaggaatgactaagatggccaaaatgattgatgagagacagcaggagttgactcaccaggaacaccgtgtgatgttggtgaactcaatgaacactgtcaaagagctgcttcctgttctcatttcagctatgaagatttttgttacaaccaaaaactcaaaaaaccaaggaatagaagaagctttgaaaaatcgaaattttactgtagaaaagatgagtgctgaaattaacgagatcattcgtgtgttacaactcacttcctgggatgaagacgcctgggccagcaaggacactgaagccatgaagagagcgctggcgtccatagactccaaattgaaccaggccaaaggttggctccgtgaccccaatgcctccccaggggatgctggagagcaggccatcaggcagatcttagatgaagctggaaaagttggtgaactttgtgcaggcaaggaacgcagggagatcctaggaacctgcaaaatgctagggcagatgactgaccaagtggctgacctccgagccagaggacaaggagcttccccagtggccatgcagaaggcccagcaagtgtctcaggggctcgacgtgcttaccgccaaagtggagaatgcagctcggaagctggaagccatgacgaactcaaagcagagcattgcaaagaagattgatgctgcccagaattggctggcggatccaaatggtggacctgagggagaagaacagattcgaggggctttggctgaagctcggaagattgcagaattatgtgatgatcctaaggagagagatgacatcctccgctcccttggagagatagctgctctgacctctaaactaggagacttgcgaagacaggggaaaggagactcgccagaggctcgagccttggctaaacaagtggcgacggcactacagaacctgcagaccaaaaccaacagggccgtggccaacagcagacctgccaaagcagctgtccacctcgagggcaagattgaacaggcgcagcggtggattgataaccccacagtagatgaccgtggagtcggtcaggctgccatccgtggacttgtggctgaggggcatcggctggccaatgtcatgatgggaccttatcgccaagatcttcttgccaaatgtgaccgtgtagaccagctaacagctcagctggctgacctggctgcccgaggggagggggagagtcctcaggcgagagcacttgcatcccagcttcaggactccttaaaggatcttaaagcccagatgcaggaagctatgactcaagaggtatccgatgttttcagcgatactacaactcctatcaagctgttggcagtagccgccactgctcctcctgatgcacccaatagggaagaggtatttgatgaaagggcagccaattttgaaaaccattcaggaaggcttggagccacagcagagaaggcggctgctgttggtactgccaataaatcgacagtggaaggcattcaggcatctgtgaagacagcccgagaactcactccccaggtcatctccgctgctcggatcttactgaggaaccctggtaaccaggctgcttatgaacattttgagaccatgaagaaccagtggattgataatgttgaaaaaatgacagggctggtggacgaggctattgataccaagtctctgttggatgcttctgaagaagcaattaaaaaagacctggacaagtgtaaggtagccatggccaatattcagcctcagatgctggtcgctggagcaaccagtattgctcgtcgggccaaccggattctgctggttgctaagagggaggtagagaactctgaggacccgaagttccgagaggctgtgaaagctgcctctgatgaactgagcaaaacaatctcccccatggtgatggatgccaaggctgtggctggaaacatctctgaccctggcctgcaaaagagcttcctggactcaggatatcggatcctgggagctgtggccaaggtcagagaagccttccaacctcaggagcctgacttcccgcctcctccaccagaccttgaacagctacgactaactgatgagctggctcctcctaagccacctctgcctgagggtgaagtccctccacccaggcccccaccaccagaagagaaggatgaagagttccctgagcagaaagctggtgaggtgattaaccagccaatgatgatggccgccaggcagctccacgatgaagctcggaaatggtctagcaagggcaatgacatcattgcagcagccaagcgcatggctctgctgatggcagagatgtctcggctggtaagagggggcagtggtaccaagcgggcacttattcagtgtgccaaggatatcgccaaggcctctgatgaggtgacgaggttggccaaggaggttgccaagcagtgcacagataagcggattagaaccaatctcttacaggtatgcgagcgaatcccaactataagcacccagctcaaaatcctatccacagtgaaggccactatgctgggccggaccaacatcagtgatgaggagtctgagcaggccacagagatgctggttcataatgcccagaacctcatgcagtctgtgaaggagactgtgcgagaggctgaagctgcttcaatcaaaatccgaacagatgctggctttactctgcgctgggtcagaaagactccctggtaccagtaggcacctcgtcaaatctggctggtacatacacctctgctaaagagaagggaaccatcttgagttccagaagccattcagagttgtcaggaatggaaacatcaatccctggcttcacacaccagaaaggaacatttatactcttgtcatggacactttgaaatgtgtctctctataaaccctgtactttcagttactatgcgcactcactctctcccatggattttacagaagctcagaataagcgtgaacactagccggaagccctgctctgccccgggggtcatttctgtgtttacagttcaccaactccctttccccactataggctctcaagacctagagctgaggcaagtctaaataactgtgcttccaaagttattttgggttttcccccctgctgctgaccctgcctaccttctctgggctgtgcatcattgctgcaggaaaaagtggtctctggagagttccagcttgtgcggcctggattcatttcctgctttctcccagtgtaaccctccctagttcctcacaatgggaaaccaactttcactgttgtgaggaaatcattatttctgtttttaccatgccactaactagtatgtgttatggaaacttcctgtctcacatcctgccttgtttggttgccaaggtaaccatcctgtaaacacactggtgctctgtcactagaggaacagagtcgctggggtgttatcctgcccatcctcccagtggggccactcccagattttctatgctttgtcactgccagtagatgtctgtgctgaggccttggcattcattcttcgcccttattttctttaatttctgagctgaagtgctgcatttacttttaaccaaatcatcctaggctttggcagtcttcttctgtatgcttctttaaacaagactttaaagatacataggtatgtgtttgtctgtaatccctccatcccccactttttttctttttttaaattttgagactgggtctctttatgttgtccaggctagtcttgaacttatggattcaagtgatctacctgtgtcagcctgttagctcctaccaccacacttgactttgcttgtaactttgaaaggttcattcaaaattaagacttaagaattagggcttgctccttaagagacttgaatggaaaggcaatcttgtctgggagactagcatttgcagattatacttctggtgcttctagggaaaaatcagtaggaactattatagttcccagttgcttttaatcaactacaaccaagcatttttcatccttccataaatacgaagtattcaagaataatgagtatggtatctatttatcagaaaggcatgtttcctatcgggcaaagttagtgtaaaagtgactttcctttttttgcatttatcctcgctgtataagcatttcccagaatacaaatgcttctttcagaaatcaggaaccagacgaatacaggagtgaggccttcttcctggatgttcttcccacatctagtatgtccaatcccaacactgaacttggaaatcttaagttgaccctgaatactcaggctccccctatttctttttgctgataaaagattcttttcaaagctctcagcagatctgtatagttgcttacctgatataaatgcatatcaatgcctttaaagtatgaatctatgccaaagatcatcttttgtcttactaaagattacttagaggaactaagaagaatcatgtttattctccaagttccttcagttctggagacacatgtccaccagatgtgttttcaagtgtcagtgcttacagtacaaggaggcaaaaggaaacagtccctgagtgacgtgttagagatgccaccactaaaaactatgtttataagctaggacttatatgcaaatgtttctgcctcttcttttgttctgtttaaaacaataaagtacatttatatgaaaaaaaaaaaaaaaaaaaaaaaa

SEQ ID NO: 261 - DNA, 3610 bp, Mus musculus
gttcctcggagcctggtgataagcgacgctcccaccttcgcctctaactcgctgccgccaccctgcccagtgtcctccggagtcccggacccgagcacgatgtggaaacgatggctggcgctctcgctggtgaccatcgccctggtccacggcgaggaggaacctagaagcaaatccaagatctgcgccaatgtgttttgtggagctggcagggaatgtgccgtcacagagaagggggagcccacgtgcctctgcattgagcaatgcaaacctcacaagaggcctgtgtgtggcagtaatggcaagacctacctcaaccactgtgaacttcatagagatgcctgcctcactggatccaagatccaggttgattatgatgggcactgcaaagaaaagaagtctgcgagtccatctgccagcccagttgtctgctatcaagctaaccgcgatgagctccgacggcgcctcatccagtggctggaagctgagatcattccagatggctggttctctaaaggcagtaactacagtgagatcctagacaagtactttaagagctttgataatggcgactctcacctggactccagtgaattcctgaaattcgtggagcagaatgaaacagccatcaacatcaccacttatgcagatcaggagaacaacaaactgctcagaagcctctgtgttgacgccctcattgaactgtctgatgagaacgctgactggaaactcagcttccaagagttcctcaagtgcctcaacccatccttcaaccctcctgagaagaagtgtgccctggaggacgaaacctatgcagatggagctgagactgaggtggactgcaatcgctgtgtctgttcctgtggccactgggtctgcacagcaatgacctgtgatggaaagaatcagaagggggtccagacccacacagaggaggagaagacaggatatgtccaggaactccagaagcaccagggcacagcagaaaagaccaagaaggtgaacaccaaagagatctaagaagaggcacagagcaccgtgtccggagcccagcgcctcctcttcagcgctgagcccagtacacacagagtctgcagcaatcaccaaatcactagtatttgcttgtatggcagcgaatcttattttgtttgttttgcaataaaggaaatgagggtggccagcctagcgagggaaggccacaaccttcacctgtaggaatgctttaagagaaactaaaggacaccttgggacgagaggcaactaaggaaacagcatcgggttggcagaggagcagaggcaggtttgaatgaagcctttctggggtcacagcagctgcgaggagaatacaggaaaagcatagagaaacattgaactagccctgctggaggaagtggggggagctttgtagggaggaaccctgctgctttgacccttgtcaccactgtcagcatgacagacctgcagcaagtctgcttctccttttggtcccaacaatcacctgaacacacagccgcccaactagttacctgtgtccctcagccttgcatggagtttcctggaggaggtgtttaaatgatgcagacacttatgtacttcaagcgccatggagacctaaccaaatttttaaaatacatttttctttttttttttttttgttaaccaaaggtgctatttctctgtaaaagacttttttccaagctgacttcattcctcagttattaccgttatattattgttgttttttaatatttcattttttgactagatattaagcttttgtaattattttttcattagtcctactatttcagaagtgaaggtgaagggggtttgggcatttttccaggtacagggaactctgtaacacaaacagcccataccctgtcacatattagaccggttgcagttcggagctgcaccccaacccagagcttctagaaaatcagctccatgccacgaagcacaagaggcccctcagacagaagccacaggacaaagcatcttcatagacagctgttgagatccaaacagttaatttgcttttgtttcttgtaagaagttccaaggatggacgctcaggctatcccagcctgccagcctgctgtgatctgtggctaactggcagagtcagccactgtggtccttagctgctcctgtttctaggtgtcagtttacttagtaaactggtaagaatgaatcttggaatttaataaatggtagtttgtggtttagccaactggtccagagggagctaccttctccttaggatagatgaatctacaccataagaaaaaccagccaggaatagcatggatgggttttgctttggttgaaatgatcctagcaggtgactgggtatgaggacttcatggtcactctgcccaggaagagagcgtgaaggacaactagcagcttccttagggatggtacacatgagtgtgatctctggagtcagaggtttccccacacacatgatgataaaacttttcagatttagagcggttaaaactggagatcgaatctggattgagaatcagcactgggggagaaactgttattgaaagtcaatcctttctttgagcctccgaataaactatggagattttcctgcataggaaagtgtggaatgttgagctattgagatgggagtggaattcgtcctaaatagtttttcctggtctcatctgaacaagacaatttggctctgcctagtgttctgtgccctccctttcaaaagctctgagccccgctcatgcagtccagatttcatccccctctccaagtgccttggagagctcacagcagcaatgccatcatcaaaagttttgctgctgggaagaaaaaaaaaaaaaaaaaagaaaaaaaaaagttttgctggttcttggaggtgatgggagagggcaggagtatcaatttgttcaagtagctgcagtgtctgttggccaatcatctttagaaccctgtaacactgagtaccagagggcaagcccacattcctcttctgctacttcagtgtaactagggcagctgttgtctgaagcaccatagattcaggtgatcctccatagattcaggtgatcctccatagattcaggtgatccttgaaccgttcatgaaaagctgctaagtagcctggtttgggagacttgggttgagatttgcatgggaccaacacgcaggattacatcttcttcagttcctagagtcctctagaagcctatagaacaagacggcaagctctctgggcttgctctggggttttgttctgtggttttatgttgttcttgttgttttattaacatcagtgtctcttaagatccaggacccagggaggtcttttcacatacatataccaggactcttgggtactactgtcagtcttggggaagcaggctcctccatcggcaaccaaatccatgtgagcactccgaatgccttggttagtcctatgacctaaatagttaaacttcagaaaatggtttcaacagatttctgtgccgagtggttttgaaattgcatttgtatttgctgtgcttctgtattccatttaactgggttttttgttacttctgatttttgttactattaataaataaaaataaaataaagt

SEQ ID NO: 262 - DNA, 4206 bp, Mus musculus
ggcccgcgcgcacagaggccgcagcagctccgcgggtccctcccaccgcgcgcgcccatggcggtcgcgggccagttgtgcctgctctacctgtccgcggggcttctagcccggctgggtacagccttcaacctggacacccgcgaggacaacgtgatccggaaatcgggggatcccgggagcctcttcggcttctcgctcgccatgcactggcagttgcagccggaggacaagcggctgttgcttgtgggggcacctcgggcagaagcactcccgctgcagagggcgaacagaacagggggcctgtacagctgtgacatcacctcccggggaccttgtacacggattgaatttgataatgacgctgatcctatgtcagaaagcaaggaagaccagtggatgggagtcactgttcagagccaaggtccagggggcaaagtggtgacgtgtgcacatcgatatgagaaacggcagcacgtcaacacgaagcaggagtcgcgggatatctttggaagatgttatgtcctaagtcagaatctcagaattgaagatgatatggacggaggagactggagtttctgcgatggccggttgagaggccatgaaaagtttggctcctgtcagcaaggagtagcggctactttcactaaggactttcattacattgtttttggagccccagggacttacaactggaaagggatcgtccgtgtagaacaaaagaataacactttttttgacatgaacatctttgaagatgggccctatgaagttggtggagagactgatcatgatgaaagtctcgtgcccgttcctgctaacagttacctaggcttttcactggactcagggaagggtattgtttctaaagatgacatcacttttgtgtctggtgctccaagagccaatcacagtggggctgtagttttgctaaaaagagacatgaagtccgcgcatctgctccctgagtatatatttgacggagaaggcctggcttcctcgtttggctatgatgtggcagtggtggacctcaatgcagatgggtggcaagacattgttatcggagctccacagtattttgatagggatggtgaagtcgggggtgcagtttacgtctacattaaccagcaaggcaaatggagtaatgtgaagccgattcgtctaaatgggaccaaagactcgatgtttggaatctctgtgaaaaatataggtgatattaaccaagatggctatccagatattgctgttggagctccctatgatgatctggggaaggtttttatctatcatggatccccgactggcataattaccaagccaacacaggttctcgaggggacatcgccttacttcggctattcaatcgctgggaatatggacctggatcggaattcctaccccgaccttgctgtgggctccctctcagactcggtcactattttcagatcccggccagtgattaacattctaaaaaccatcacagtgactcctaacagaattgacctccgccagaagtccatgtgtggctcacctagcgggatatgcctcaaggttaaagcctgttttgaatatactgcgaaaccttccggttataaccctccaatatcaattttgggtattctcgaagctgaaaaagaaagaagaaagtcagggttgtcatcgagagttcagtttcgaaaccaaggttccgagccaaagtatactcaggagctgaccctgaatcggcagaagcagcgggcgtgcatggaggagaccctctggctgcaggagaacatcagagacaagctgcgtcccatccccatcacggcttctgtggagatccaggagcccagctctcgccggcgggtgaactcactccccgaagttcttcccatcctgaattcaaatgaagccaaaacggtccagacagatgtccacttcttaaaggaaggatgtggagacgacaatgtctgtaacagcaaccttaagctagagtataaatttggtacccgagaaggaaatcaagacaaattctcttaccttccaattcaaaaaggcatcccagaattagtcctaaaagatcagaaagatatagctctggaaataacggtgaccaacagcccttcggatccaaggaatccccggaaagatggcgacgatgcccatgaagccaaactcatcgccacgtttccagacactctgacatattccgcttacagagaactgagggctttccctgagaagcagctgagctgtgtggccaaccagaatggctcccaagccgactgtgagctcggaaatcctttcaagagaaattccagtgttactttctatctgattttaagtacaaccgaggtcacctttgacaccacagatctggatattaatctgaagttggaaacaacaagcaatcaggataatttggctccaattacagcgaaggcaaaagtggttattgaattgcttttatcggtctccggagtcgctaagccttcgcaggtgtattttggaggtacagttgttggtgagcaagctatgaaatctgaagatgaagtaggaagtttaatagagtatgaatttagggtgattaacttaggcaagcctcttaaaaacctcggcacagcaaccttgaatatacagtggcccaaggagattagcaatggcaaatggttgctttatttgatgaaagttgaatccaaaggtttggagcagattgtttgtgagccacacaatgaaataaactacctgaagctgaaggagtctcacaactcaagaaagaaacgggaacttcctgaaaaacagatagatgacagcaggaaattttctttatttcctgaaagaaaataccagactctcaactgcagcgtcaacgtgaggtgtgtgaacatcaggtgcccactgcgagggctggacagcaaggcctctctcgttcttcgttccaggttgtggaacagcacatttctagaggaatattccaaactgaactacttggacattctcctgagggcttccatagatgtcaccgctgctgctcagaatatcaagctccctcacgcgggcactcaggttcgagtgacggtgtttccctcaaagactgtagctcagtattcaggagtagcttggtggatcatcctcctggctgttcttgccgggattctgatgctggctctattagtgtttttactgtggaagtgtggcttcttcaagagaaataagaaagatcattacgatgccacctatcacaaggctgagatccatactcagccgtctgataaagagaggcttacttccgatgcatagtattgatctacttccataattgtgtggattctttaagcgctctaggtacgatgacagcattccccgataccatgcggtgcggatccggaaagaagagcgagagatcaaagatgagaaacacatggataacctcgaaaaaaaacagtggatcaccaagtggaatgaaaacgaaagttactcatagagaggagggcacaggaaagaacacctcacactacccaaagcccccccttattttttccagctcagaaattcaggtggcttcaaagcctgctcagctcccccatatatgatttcagactgacgacacccagtatggacctacagtttcaactgtggatattgttacacctaaggctcctgttttgcacagccaaatttaagactggtagagtggatttttctttaactgccttaatttaactttccggattgcctttgtttttgacgtggctgacttccacacgctggggcagggcctgcccatctgcactgctgggatgctctcccccaggtcacctgtgctaacagagtggctatcccagcctgctcccacaagcattcttctcataagattgaccttggctcaagactgccaatggatagctgtgcctctggtgaaagttctgtcttaaatgtgcaatagaaggtgatgttaccctttggccttctttctccatctcctagaagtgaggacccttgctgacgccaaatgcacacaggttcccgtctcccttgtcactaaagcacagggtcgacagacttgaatgctagttacatttgtttgtatatgatatttatttttttcttcaagccatcttgctgttgactaataggccaaagatgcttctgggtggtttaagcaatgagaatgagaacctgggaggtcttgttgttgttgttgttctgaccttacttatttactgc

SEQ ID NO: 263 - DNA, 1104 bp, Mus musculus
ggacttgtttcggaaggagctgactggccaatcacaattgcgaagatgaaggctctgtgggccgtgctgttggtcacattgctgacaggatgcctagccgagggagagccggaggtgacagatcagctcgagtggcaaagcaaccaaccctgggagcaggccctgaaccgcttctgggattacctgcgctgggtgcagacgctgtctgaccaggtccaggaagagctgcagagctcccaagtcacacaagaactgacggcactgatggaggacactatgacggaagtaaaggcttacaaaaaggagctggaggaacagctgggtccagtggcggaggagacacgggccaggctgggcaaagaggtgcaggcggcacaggcccgactcggagccgacatggaggatctacgcaaccgactcgggcagtaccgcaacgaggtgcacaccatgctgggccagagcacagaggagatacgggcgcggctctccacacacctgcgcaagatgcgcaagcgcttgatgcgggatgccgatgatctgcagaagcgcctagctgtgtacaaggcaggggcacgcgagggcgccgagcgcggtgtgagtgccatccgtgagcgcctggggcctctggtggagcaaggtcgccagcgcactgccaacctaggcgctggggccgcccagcctctgcgcgatcgcgcccaggcttttggtgaccgcatccgagggcggctggaggaagtgggcaaccaggcccgtgaccgcctagaggaggtgcgtgagcacatggaggaggtgcgctccaagatggaggaacagacccagcaaatacgcctgcaggcggagatcttccaggcccgcctcaagggctggttcgagccaatagtggaagacatgcatcgccagtgggcaaacctgatggagaagatacaggcctctgtggctaccaaccccatcatcaccccagtggcccaggagaatcaatgagtatccttctcctgtcctgcaacaacatccatatccagccaggtggccctgtctcaagcacctctctggccctctggtggcccttgcttaataaagattctccgagcaaaaaaaaaaaaaaaa

SEQ ID NO: 264 - DNA, 1857 bp, Mus musculus
aagaaatgaaacaactctgagagtgttgtaatcactaccatcttcctttacacccaactgttcagtttctcatttactgacttatctgcctacctactcaagccaagcaggccacttcttgacccggtgaaggtctcaggatctgtacatcactgcagaaatatccaggaagctgacacactctgccttgttggagatctaggacccggaacaggagtcactgaagaagttcccggcttgaagaactcaatcaaaaagtctgtatctacagaaagagacatctgtcccaggcaatgtccaaccgtaacttaaggtcatctaccaactcagaattttctgagggtcaacatcagaccccttccagtgattcatctggccatggggaggatcaacctcaagcctctcctggacctaacaaaaagtcacacaccccaaaaaagaacattagcaaaggtgctgttcttcatgagaaacccatgacagtgatggtactcactgcaacagaaccatttaattataaagagggaaaagagaacatgtttcatgctacagtggctacagagagccaatattaccgtgtgaaagttttcaacatggacttgaaagagaagttcacagaaaataaatttattaccatttccaaatacttcaacagcagtggcatcctagagatcaatgaaactgccactgtgtcagaggctgctcctaaccaaatgtttgaagtgcccaaaaatattatcagaagtgcaaaagaaactcttaagatctctaaaattaaagaacttgattctggaacactgatttatggtgtgtttgcagtagagaagaaaaaagtgaatgataaaagtataaccttcaaaataaaagataatgaagataatataaaagtggtgtgggataaagaacagcacaatatcaactatgagaaaggagataaactccaactcttctcctttcacctgagaaaaggaaatgggaaaccaatattacactctggaaatcacagtttcatcaagggagaaaagctactaaaagaatcttttgaaggggatggttaccacaaaggtcccaaacaagtggtggcattgaaagcaacaaaactatttacttatgatagtataaaaagtaaaaagatgttccatgccacagtggctactgatacagaattcttcagagtgatggtgttcgaggaaaacctagagaaaaagtttatcccgggaaacaccattgctttatcagattattttggtatgtatgggtctctggcaatacatgaatattccagcgtgtctgaggtgaagagccaaaataaggaagactcaagttcatcagatgaaagacccatagaacatcttaaaatttgtgatcttcacttgcaaacagaagaaaggctgtttgatggagagtttaaagtatacaggaaaagttccggaaataattgtatatgctatggaatttgggatgatacaggagcaatgaaagtggtggtatctggacaactgaccagtgtcaactgtgagattggtaatacaattagacttgtctgctttgaattgacctcaaatgcagatgagtggtttctgagagctacgaggtacagttacatggaggtcatcatgcctgaaaaatgaaaaacagtgagtgatgtaaccccaattcaatggtggaaatttccttatgaaacatgtacactgaaaatggaaaagaaatgtatacctgctcaaatataatacatacaacatccagctcttagttgtgggaacaatactttagcttattctttataaaaattttatgaactttcatagtctgcatgcttaagtttcataatatgaaataaataaatgctgtacatta

SEQ ID NO: 265 - DNA, 4901 bp, Mus musculus
cacccgccaaggctcgtttctcaggctcaggaatccgctcctgtggcttctcttcgaactcagctgttggctttattacccttcccacttgtgctttcctcacaccccctggggtctggcaggcccaatggactccaaagagcgaagtgaagggaatgggaattgtgtgctgcgacccatcagaatcgctactagcagcggtgacttagtcctgtagcggaggctgggaccctggggctagcagcgccacgatcttccttgaggaatgcatcagtccagaacccgcgctgccagtatttgctctggaagtggccacaatgaggaaggaaccgaagagagagcttcattcagcacacctccaaattaactgtttggtgacttgttagtgctaaggctaccacctttctcctgccctcccgcggggcgccctgccgcctcaccatcacccacacctcctgcctcatcgcgcccgcctccagctccgccccggctccccatgccggcgcaatggagttatccgaagggcgatgattgccgccacagctgctaacttagcacccatcctagccatcggttacccttggccagcctttctgcagccgcctatacgtgggcgtccagagtccagtgccgcagccagacccgcccgacgcgcagcagaagcgcgcccaggcgcctcttggagaaggaagactgcgccaagacgctgagcttagagacagccagggggctggagcgcagaaagggacagcgtggctcagagcgctgaggatttcgcggacaaacagccaccactttcactgcgtatccaagctgagctgattggcgggatggtggcttgccagtacacaggggtccgctgcattctaccaggaacaccttgctcctgggctcactatgacttgacctgtgggggccctgctcagggctcctgcagtcgaacagcttaggaaaggagggatcgctgccaagcggcctttgggtctttaggaacccctatcaccaactgacacaaccagtgtctgtgcctccctccccgcggacccaagccatggagctctcggatgtgcactgccttagtggcagcgaggaactctacaccatccaaccgacgcccccggtcggcgacgacgggagcggctctcggccgcagcggctgctgtggcagacggcggtgcggcacatcacggagcagcgcttcatccacgggcaccgaggcggcggctgcggcggggtctcccgcaaagcctcgaaccctgcgggcagcggacccaatcaccacgcgccgcagctgtctagcgactcggtgctgcctctctattctctgggccccggagagcgagcgcacaacaccggtggcaccaaagtctttccggaacgcagcgggagcggcagtgccagtggcagcgggggcgggggcgacttgggcttcctacaccttgactgtgccccaagtaactcggatttcttcctcaatggaggatacagctaccgaggggtcatttttccaaccctacgcaactccttcaagtctcgggatctggagcgcctctaccaacgctatttcctgggccagaggcgcaaatcggaggtagtgatgaacgtgttggatgtactaaccaaactcacccttttagtcctgcacttgagcctggcctcggctccaatggaccctctcaagggcatcctgctaggctttttcactggcatcgaggtggtgatctgcgccctcgtggtggtcaggaaggacaacacctcccacacttacctgcaatacagcggcgtggtcacttgggtggctatgaccacccagattctggcagcaggcctgggctatgggcttctgggcgacggcataggctacgtgctttttacactcttcgccacctacagcatgcttcccctgcctctcacctgggccatcttggccggcctgggcacatctttgctgcaagtcacccttcaagtactcatacccaggctagcggtcttttccatcaaccaggtcctggcccaggtggtgctattcatgtgtatgaatacagcaggaatcttcatcagttacctttcagaccgtgcccagcgccaggccttcctggagacccggaggtgtgtggaggccaggctccgcttggagacagagaaccaaagacaggagcggcttgtgctgtctgtgctccccaggtttgtcgtcctggaaatgatcaacgacatgaccaatgtggaggatgagcacctgcagcatcagttccaccgcatctacatccatcgctatgagaacgtcagtattctttttgcagatgtcaaaggatttaccaacctctctacgaccttgtctgctcaggagctggtcaggatgctcaacgaactctttgccagattcgaccggctggcccatgagcatcactgtcttcgcattaaaatcctgggggactgctactactgtgtgtctggactgcctgagccccgccgggaccacgctcattgctgtgttgaaatgggcctcagcatgatcaaaactatcaggtttgtgagatccagaacgaagcacgatgttgacatgcgaattggaatccattcaggttctgtgctatgtggtgtgttgggcctgaggaaatggcagtttgatgtctggtcttgggatgtggacatagcaaacaagcttgagtctggaggaatccctgggaggattcacatttctaaagccaccctggattgcctcaatggtgactataacgtggaagagggtcacgggaaagagaggaacgaattcttgaggaagcataacatagagacctatttgattaagcagcctgaggagagtttgctctgcttgcctgaagacatcgttaaggagtcggtgagctgctctgacaggagaaacagtggagcaacattcacagaaggatcgtggagcccagagctgcctttcgacaacatcgtgggcaaacagaatactctggctgccctaacaagaaattcaataaatctgcttccaaaccatctcgcacaagctttgcatgtccagtctgggcctgaggaaattaacaagagaatagagcataccatcgacttgcggagtggcgataagttgagaagagagcatatcaagccattctcactgatgtttaaagactccagcctggagcacaagtattctcaaatgagggatgaagtattcaagtcaaacttggtctgtgcatttatcgttcttctgtttatcactgcaattcaaagtttgcttccttcttcaaggctgatgcctatgactatccagttctccatcctgatcatgctgcactctgccctggtcctcatcaccacagcagaagactataagtgtctgcccctcatcctccgaaaaacctgctgttggattaatgagacctatctggcccgcaacgtcatcatcttcgcttccatcttaattaacttcctgggagctgtcctaaatattctgtggtgtgattttgacaagtcgatacccttgaagaacctgactttcaattcctcagctgtgtttacagatatctgctcctacccagagtactttgtcttcactggggtgttggccatggtgacctgtgctgtgtttgtacggcttaactctgtcctgaagctggcagtgctactcatcatgatcgccatctacgccctgctcacagagaccatctacgcaggtctctttctgagttatgacaacctgaaccacagtggagaagatttcctggggaccaaggaagcatcactgctgctgatggccatgttccttcttgctgtgttctaccatggacaacagctggagtacacagcccgcctggatttcctgtggcgcgtacaggccaaagaggagatcaacgagatgaaggaactgagggaacacaacgagaacatgctgcgcaatatcttacccagccatgtggcccgccacttcctggagaaagacagagacaatgaggagctgtattctcaatcctacgatgctgttggagtgatgttcgcctccatccctgggttcgcagacttctactctcagacagaaatgaacaaccagggagtagaatgtctgcgcttgctgaatgagatcattgctgactttgatgagctgctcggggaggaccggtttcaggacattgagaagattaagaccattggtagtacatacatggctgtctcaggactgtccccagagaaacagcaatgtgaagataaatggggacatttgtgtgccctggctgacttctctcttgctctgactgaaagcatacaagagatcaacaagcattcattcaacaattttgaactccgaatcggcatcagccatggctcagtggtggcaggtgtaattggagctaagaaaccacagtatgacatttgggggaaaactgtgaacttggcaagccgaatggacagcacgggagtaagtggccggatccaagttcctgaggagacctaccttatcctgaaggaccagggctttgcctttgactaccgtggggagatatatgtgaagggcatcagtgaacaagaagggaaaatcaaaacatactttctcctgggacgagtccaacccaacccattcatcttacccccaaggagacttcccgggcaatactctctggctgcggttgtccttggccttgtccagtctctcaacaggcaaaggcagaagcaacttctcaacgagaacagcaattcgggcatcatcaagagccattacaaccggcggactttgctaacgccaagtgggccagagcctggagcacaagctgaaggcactgacaaatccgatttgccataaaagcattttctttgtgtttctttctcgttttttttttgtatttcttttatatataaaataaatatactaataaaaaggtttaattttttttagaacaaga

SEQ ID NO: 266 - DNA, 1669 bp, Mus musculus
cgcttccccggtgctcaccacccgcgtcaccaggaggagcgcactggagccaagccgcagaccggactccagattccaaggaggccacgccatgaagattctcctgctgtgcgtggcactgctgctgatctgggacaatggcatggtcctgggagagcaggaggtctctgacaatgagctccaagaactgtccactcaagggagtaggtatattaataaggagattcagaacgccgtccagggagtgaagcacataaaaactctcatagaaaaaaccaacgcagagcgcaagtccttgctcaacagtttagaggaagccaagaagaagaaagaggatgctctggaggacactagggattctgaaatgaagctgaaggcattcccggaagtgtgtaacgagaccatgatggccctctgggaggagtgcaagccctgcctgaagcatacctgcatgaagttctatgcacgtgtctgcaggagcggctcagggctggtcggccagcagctagaggagtttctaaaccagagctcacccttctacttctggatgaacggcgaccgcatcgactccctgctggagagtgaccggcagcagagccaagtcctggatgccatgcaggacagctttgctcgggcatctggcatcatagacacgctctttcaggaccggttcttcgcccgtgagcttcatgacccccactacttctcccccatcggcttcccacacaagaggcctcatttcttatatcccaagtcccgcttggtccgcagcctcatgtctccctcccactatgggcctccgagcttccacaacatgttccagcctttctttgagatgatccaccaggctcaacaggccatggatgtccagctccacagcccagccttccagttcccagacgttgatttcttaagagaaggtgaagatgaccgcactgtgtgcaaggagatccgccgcaactccacaggatgcctgaagatgaagggccagtgtgaaaagtgccaggagatcttgtctgtggactgttcaaccaacaatcctgcccaggctaacctgcgccaggagctgaacgactcgctccaggtggccgagacggtgacagagcagtacaaggagctgctgcagtccttccagtcgaacatgctcaacacctcatccctgctggagcagctgaacgaccagttcaactgggtgtcccagctggctaacctcacacagggcgaagacaagtactaccttcgggtctccaccgtgaccacccattcctctgactcagaggtcccctcccgtgtcactgaggtggtggtgaagctgtttgactctgaccccatcacagtggtgttaccagaagaagtctctaaggataaccctaagtttatggacacagtggcggagaaggcgctacaggaataccgcaggaaaagccgtgcggaatgagatagaagcatcaccttcctatatgtaggagtgtctgggagggaatctcccagctccccgaggtggctgcagacccctagagaactccacatgtctccaggcgagtaggcctcacccaagcagcctgcccttcctctggattctgtacactaatgcctgcacttgctgctctcgggaagaactgattcccccacgcaactaatccaataaaagccgccttgcgatacgtgt

SEQ ID NO: 267 - DNA, 2990 bp, Mus musculus
cagagagctgatcctgggggctggagcctttcagcaatcatacaagatgcagccactctctgtcccctgccccaatgaacatctgcactaggcccaagccttggagtgatttacctgaagagtgacaccaattatctggaaactactaaagtataattgagaggaacagggtgaaggaaatgcaaatgcgaaagggaagcagtagatgaggaaactgaagcccagagaagtgaagtgaggtgcccaaagccacacagcaagttgcaggcacagctagttccgtagctcaagtctcctgactcccagtccagtgttcttcccattactccacgggtcctgtctctaagcttcctgacaaatgctagaacggaagaaacccaagacagctgaaaaccagaaggcatctgaggagaatgagattactcagccgggcggatccagcgccaagccggcccttccctgcctgaactttgaagctgttttgtctccagccccagccctcatccactcgacacattcactgacaaactctcacgctcacaccgggtcatctgattgtgacatcagttgcaaggggatgaccgagcgcattcacagcatcaaccttcacaacttcagcaattccgtgctcgagaccctcaacgagcagcgcaaccgtggccacttctgtgacgtgacggttcgcatccacgggagcatgctgcgcgcacatcgctgcgtgctggcagccggcagccccttcttccaagacaagctgctgctgggctacagcgacatcgaaatcccgtcggtggtgtccgtacaatcggtgcaaaagctcattgacttcatgtacagcggtgtgctgagagtctcacagtcggaagctctgcagatcctcacagccgccagcatcctgcagatcaaaacagtcatagatgagtgcactcgcatcgtgtcacagaacgtgggcgatgtgttcccaggcatccaggattctggccaggacacaccaagaggcacaccagagtcaggcacatctggccagagcagtgacacggaatcaggctacctgcagagccacccacagcatagtgtggaccgaatctactccgcactctacgcctgctccatgcagaatggcagcggcgagcgctccttctacagtggtgcagtggtcagccaccacgaaacagctctcggcctgccccgtgaccaccacatggaagaccctagctggatcacacgcattcatgagcgctcccagcaaatggagcgctacctgtccaccacccctgagaccacgcactgccgcaagcagccccggcctgtgcgtatccagaccctggtgggtaacatccacatcaagcaggaaatggaagatgactatgactactatgggcagcaaagggtgcagatcctagaacgcaatgaatccgaggagtgcacagaagacactgaccaagcagagggcactgagagcgagcccaaaggtgaaagctttgattctggggtcagctcctccatcggcaccgaacctgactcagtggagcaacagtttggggcagcagccccaagggacggtcaggcagaacccgcccaacctgagcaggcagcagaagccccagctgagagcagtgaccagccaaaccagctagaaccaggtgcctcctctcctgagagaagcaacgagtcagagatggacaacacagtcatcactgtcagtaacagctccgataagggtgtcctacagcagccttcagtcaacacatccatcgggcagccattgccaagtacccagctctatttacgccagacagaaaccctcaccagcaacctgaggatgcctctgaccttgaccagcaacacacaggtcattggcaccgctggcaacacctatctgccagccctcttcactacccaacccgcgggcagtggccccaagccttttctcttcagcctgccgcagcccctgacaggccagcagacccagtttgtgacagtgtcccagcccggcctgtccacctttactgcacagctgccagcgccacagcccctggcctcatctgcaggccacagcacagccagtgggcaaggcgacaaaaagccttatgagtgcactctctgcaacaagactttcacagccaaacagaactacgtcaagcacatgttcgtacatacaggtgagaagccccaccagtgcagcatctgctggcgctccttctccttgaaggattaccttatcaagcacatggtgacgcacaccggcgtgagagcgtaccagtgtagcatctgcaacaagcgcttcacccagaagagttccctcaacgtgcacatgcgcctgcaccgcggggagaagtcctatgagtgctacatctgcaaaaagaagttctcccacaagaccctgctggagcgacacgtggccctgcacagtgccagcaacgggacccctccggcaggcacgcccccaggtgcccgcgcgggtccgccaggcgtggtggcctgcacagaggggaccacttacgtctgctccgtctgcccagcaaagtttgaccaaatcgagcagttcaacgaccacatgaggatgcatgtgtctgacggataagtagtacctttctctctttcttacgaaccaaacaaaacgacaacaaaagaaataaacaagcaaacaaacagacaaaaagctatggcactagaatttaagaaatgttttggtttcctttttactttctgtttttgtttctgttccgtttcattttgtactacatgaagaactgttttttgcctgctggtacattacatttccgggggcttgggtggataatacttttcccagtcccccttggatggtggccttaaggcctggtagtgcttcaggaggtccactggttggatctctagctactggcctctaaatacaacccttctttaaaaaaaaaaaaaaaaaaaaaaaaaaaaaaaaaaaaaaaaaaaaaaaaaaaaaaaaaaaaaaaaaaaaaaaaaaaaaaaaa

SEQ ID NO: 268 - DNA, 1882 bp, Mus musculus
tttatgggacagtccgggagccgcggcggctgcgctcgtctacgtcttctctgtcgcctcctcgcgcagtgggagcgcccgaggccggttccggggatgtaagaggataagccttcggctgctgggaatccgctcgggatctgccagccgggaccgggttccagctcgtcagttcgggaggcgcccaggcttggcttccccgagtccccagaaagatgaatccgtcctcggtgccccatccgctcccgccgccagggcagcaagtcatccacgtcacgcaggacctggacaccgacctcgaagccctcttcaactctgtcatgaaccccaagcccagctcatggcggaaaaagatcctcccggagtccttctttaaggagcccgattccggctcgcactcgcgccaatccagcacagactcatcaggcggccacccggggcctcgactagctggcggcgcgcagcacgtccgctcgcactcgtcgcccgcatccctgcagctgggcaccggtgcgggagccgctggaggccctgcacagcagcatgcacatctccgccagcagtcctatgacgtgaccgacgagctgccgttgccccccgggtgggagatgaccttcacggccactggccagagatacttccttaatcacatagagaaaatcaccacatggcaagaccccaggaaggtgatgaatcagcctctgaatcatgtgaacctccacccgtccatcacttccacctcggtgccacagaggtccatggcagtgtcccagccgaatctcgcaatgaatcaccaacaccagcaagtcgtggccactagcctgagtccacagaaccacccgactcagaaccaacccacagggctcatgagtgtgcccaatgcactgaccactcagcagcagcagcagcagaaactgcggcttcagaggatccagatggagagagagaggattaggatgcgtcaagaggagctcatgaggcaggaagctgccctctgccgacagctccccatggaaaccgagaccatggcccctgtcaacacgcctgccatgagcacagatatgagatctgtcaccaacagtagctcagatcctttcctcaatggagggccctatcattcacgggagcagagcacagacagtggcctggggttagggtgctacagtgtccccacaactccagaagacttcctcagcaacatggacgagatggatacaggtgaaaattccggtcagacacccatgaccgtcaatccccagcagacccgcttccctgatttcctggactgccttccaggaacaaatgttgacctcgggactttggagtctgaagatctgatccctctcttcaatgatgtagagtctgttctgaacaaaagcgagccctttctaacctggctgtaatcactactgttgtaacgtgatgcagctgtgagctgacgcgagtcttgggccttgcggaccaagtgatgaggcagagcgggcctgcagctgcaccacgttctgcctttgtactcacactccttgtccgtgtggccacttaatcattgcctggtgttgattcgcaggaacttgcgttacacagaaataaatactctcttttcattttctgcaagcctgcatttctgtggcagataaagcaggatgggttgtgcagaatgactttagagaatgtctgcagccctatggctgggttttattacagttagcttaaattcatatatcaactgattctaagccatacaaagctgacctcaggcagtgaattctgataggcagcttggtccaggaagtgatttacagtttcaaaagctgtattgataacagtagtaacaaatgctttaaaacttatttaacttgagcttcaaaaaaaaaaaaaaaaa

SEQ ID NO: 269 - DNA, 1851 bp, Mus musculus
atgtggatcactgctctgctgctggccgtgctgctgctggtgatcctccacagggtctacgtgggcctttacgctgcaagttccccgaaccccttcgccgaggatgtcaagcgaccgcctgaacccctggtgaccgacaaggaggctaggaagaaagttctcaaacaagctttctcagtcagccgagtaccagagaagctggatgcagtggtgatcggcagcggcattgggggactggcctcagctgcggttctagctaaagctggcaagagagtccttgtgctggaacaacataccaaggcgggcggctgttgtcatacctttggggaaaatggccttgaatttgacactggaattcattatattggacgaatgcgggagggcaacattggccgttttatcttggaccagatcactgaagggcaactggactgggcccccatggcctccccttttgacttgatgatactagaagggcccaatggccgaaaggagttccccatgtacagtgggaggaaagaatacatccagggccttaagaagaagttccccaaggaagaagctgtcattgacaagtacatggagttggttaaggtggtggcccgtggagtctctcatgcagttctactcaagttcctcccattgcccttgactcagctcctcagcaagtttgggctactgactcgtttctctccattctgccgagcgtctacgcagagcctagctgaagtcctgcagcagcttggggcttcccgtgagctccaggctgttctcagctacatcttccccacttacggagtaactcccagccacaccgccttttccttgcatgctctgctggttgaccactacatacaaggggcatattaccctcgagggggttccagtgagatcgccttccataccatccctttgattcagcgggccgggggcgctgtcctcaccagggccactgtacagagtgtgctgctggactcagctgggagagcgtgtggtgtcagtgtgaagaagggacaagagctggtgaacatctactgcccagttgtcatctccaatgcgggaatgttcaatacctatcagcacttgttgccagagactgtccgccatctgccagatgtgaagaagcagctggcgatggtaaggcctggtctgagcatgctctcaatcttcatctgtctgaaaggcaccaaggaggacctgaagcttcagtccaccaactactatgtttattttgacacagacatggacaaagcgatggagcgctatgtctctatgcccaaggaaaaggctccagaacacattccccttctcttcattgccttcccatcaagcaaggatccaacctgggaggagcgattcccagaccgatccacaatgactgcgctggtacccatggcctttgaatggttcgaggagtggcaggaggagccaaagggcaagcgtggtgttgactatgagaccctcaaaaatgccttcgtggaagcctctatgtcggtgatcatgaaactgttcccacagctggagggcaaggtggagagtgtgactggagggtcaccactgaccaaccagtactatctggctgcaccccgaggagctacctatggagctgaccatgacttggctcggctgcatcctcatgcaatggcttccataagagcccaaacccccatccccaacctctacctgacaggccaagatatcttcacctgtgggctgatgggggccctgcagggggccttgctgtgcagcagtgccatcctgaaacggaacttgtactcagatctgcaggctcttggctcaaaggtcaaggcacaaaagaagaagatgtagtccgttcagagaagagccaga

SEQ ID NO: 270 - DNA, 589 bp, Mus musculus
cccacgcgtccgctgggcgcgaagcggtcttcaggtttggtctcagttgcgcggaagtgaaacgacgcggagatggaggtgagccaggcggcgtctggtaccgacggtgtccgggaacggaggggctcgttcgaagctggaaggaggaaccaagatgaggcacctcagtccgggatgaacgggcttccgaaacactcctactggctggatctctggctcttcatccttttcgacctggccttgttcgtcttcgtgtacctcttgccctgaccggtttgctgagtcaagaatggggcttctggagtgaatcttgaaaacgactatagactcttgaatgaagaggactccagcagctgacttcggcacctctatctaaccttttcttcagcccttgacctcactaaagtactatcatatgtttaaaacctgtttttcatggttgaagtaatgattgtagctaaatgatagataatatatatttttaataatgtctgtaacttaagtacttatgggaaataaatgtatgtaaaaaaaaaaaaaaaaaaaaaaaaaaaaaaaaaaaaaaaaaaaaaaaaaaaaaaaaaaaaaa

SEQ ID NO: 271 - DNA, 824 bp, Mus musculus
agtggacaagagtgggtgtagttacttaccatcgtttcttcttctggagggtcttcaagagggaaggattagcatgtcgtccataatcagaaaggtgatcagcaccacaaaagccccggcggccattggtccctacagtcaagctgtgcaagtggacaggaccatttacatttctggacaggtaggcctggatccttccagtggacagcttgtgccaggaggagtagtagaagaagctaaacaggctcttaaaaacttgggtgagattctgaaagctgcaggctgtgacttcaataatgtggtgaaaacaactgttttactggctgacatgaatgactttggcactgtcaatgagatctataaaacatatttccagggtagccttcctgccagggctgcttaccaagtcgctgctttaccaagaggaagtcgagttgaaatcgaagcaatcgctgtccaggggcctttcatcaaggcatgactataagtagccatgctgatgttgactccggaggttttagaatgtctttcacactttaatttttacaaatgatgctgggaagtataaaaatgaccagagtggttgaagttattgtggaagtgatcaaatatgtggagatttgacattaattggagattattcagtatagtgactgatgttctaatttcacttatgttgctgggtgtgagagaagaggtgcacagctactgagatgggaagcagaaggaaagatgggctgttgtacatgagaaatagtaaggagcacatctacttaaatcatattaatttgctcatgtgaaatacttagttcttatgttagatg

SEQ ID NO: 272 - DNA, 962 bp, Mus musculus
gaagcctgcgctgaggagtcggtggaggtcggtccggctgcggagccggcgtgcgcaaaggccgctgggagccttcggagcccggggcagtgcgatggcgccggcggaggctcgcggcgcgctcccgggctggatctccgtgctgggctggggtctggcgctgtgctctctgtgcggggcgggcccactgtggagtggcagccatgagtggaaaaaactaattttgacccagcactggcccccaacagtatgcaaggaggttaacagctgccaagactctctggattactggacaatacatggactatggcccgatagagcagaagattgtaaccagtcctggcactttaacttagatgagattaaggaccttttgcgagacatgaagatctactggcccgatgtgattcaccggtcttctaatcgcagccaattctggaaacatgagtgggttaaacacggcacctgtgctgcccaggtagacgccctcaattccgagaagaagtactttgggaagagcctggatctgtacaagcagattgacctcaacagtgtgctacaaaaatttgggatcaagccatccatcaactactaccagcttgcagatttcaaagatgcacttaccagaatctatggtgtggtgcctaaaatccagtgccttatgccagaacagggagagagcgtgcagaccgttggccagatagagctgtgcttcaccaaggaggacttacatttgcggaactgcactgagccaggggagcagctgtcctccaggcaggaagcctggctggccatggaggcttctacacatgggatgatggtctgtgaagacggtccaatcttctaccctccacctacaaagacccaacattgatgttcacattttggaaatattttgtgtcccacaaagtaagaaaagttcacaaatcattgctttctaaaattttactaaaaagtttctt

SEQ ID NO: 273 - DNA, 1178 bp, Mus musculus
ggtggagcagctgggtgtggggtgcactgggcctgtggggaagccgtgttggagcgaactaaagggtctgatcggacttgggttgcgccgaaggggcagccctgagtctgcaggagagaatcccggaccgtcagacccgccttcccttgccccggcccctcccagttcccccagcgacggctgcttcctggtccccgacgcaaccatggctgaagaacaacctcaggtcgaactgttcgtgaaggctggcagtgatggtgccaagattgggaactgccccttctcccagagactgttcatggtgctctggctcaagggagtcaccttcaacgttaccactgtggacaccaagagacggacagagactgtacagaagctctgccccggtgggcagctgccgttcttgctctatggcaccgaagtgcacacagacaccaacaagatcgaggaattcctggaggccatgctgtgccctcccaggtacccaaagctggctgccctgaaccctgagtccaacacctcgggactggacatatttgcaaagttttctgcctacatcaagaactcaaacccagccctcaatgacaacctagagaagggactcctgaaagccctgaaggttctagacaattacctgacatcccccctcccagaagaagtggatgaaaccagcgccgaagatgagggcatctctcagaggaagtttctggacggcaatgagctcaccctggctgactgcaacctgctgccaaagcttcacatagtacaggtggtgtgcaaaaagtacagaggcttcaccatcccagaggcattccgtggagtgcatcggtacttgagcaacgcttatgcccgggaagaatttgcctccacctgtccagatgatgaagagatagagctagcctatgagcaagtggccagggctctcaaatgagcactttttaaagggtccttcacccactctgtgctctccacagaggcttcgggggtcttccacgttgctgcataatggacacactccgaaatagccagtgggcaggaaatccggggcacttgtggggtggggctgtgggataaggcaaaggatagtggacaagggtaagatttttattttgggatggggtgggtaggacaacgcatttcagtaataaaatacagaatgaaaaaaaaaaaaaaaaaaa

SEQ ID NO: 274 - DNA, 2577 bp, Mus musculus
ctttgccttcatcaagtaactgagctccaccattcatttccagagccgggactgttcctgctggtgccccgtgagctctcgtggtggtcagccaacagctgcggtgtctgagcagccttgctgagaggaaggagaatggcttgcagtgagttttcctttcacatgccaagtctggaggagcttgctgaagttttgcagaaggggctaactgacaactttgctgatgtccaggtctcagtggttgactgcccagatttaacaaaggagccatttacctttcctgtaagaggcatctgtgggcaaactagaattgcagaagtaggaggtgtgccttacttattgcctcttgtaaacaaaaaaaaagtttatgacctaaatgaaattgcaaaagtaataaagctgcccggagcttttatccttggagcaggggcaggtccatttcagacgcttgggttcaattctgagttcatgccaattgttcaaacagcaagtgaacacaaccaacctgtgaatggaagttactttgcccataaaaaccctgcagatggagcgtgcctgctggagaaatacagccaaaaatatcatgattttggatgtgcactactggctaatctttttgccagtgagggccaacctggcaaggtcattgaagtgcaagccaagagaagaacaggagaacttaactttgtgagctgcatgagacagacactggaggagcactatggtgacaagcctgtggggatgggaggcaccttcattgtgcagaaggggaaagtgaaagcccacatcatgcctgcagagttttcttcctgcccactgaactcggacgaagctgtcaataaatggctacacttctatgagatgaaggctcccttggtttgtctaccagtttttgtttccaaagaccctggacttgatttgcgactggagcacacacatttcttcagtcatcatggagaaggtggacactaccactacgatacgaccccagacacagtggagtaccttggatacttctcacctgcacagttcctctatcgcattgatcagcccaaagagacccatgcctttgggagagattaaagcagctgtgtaatggttagctaaggttaagttactaacccagcagctgatagtaattcaaaaatacagtagaggaccagagaggggcgggggggggggcggggagaaagagaggaagaggaagagagagagagagagagaggcattccctagcaagcagccaaggccctaccttaatccccagcacagctaataaaattaatcactacacaaacactatttttatggcatttgaaatgcaaggatgtggacacatgacactcatattaccatattatttaacatcttcatgtgaggggagcgtattgggaacatagatagctaattgagatgctcactttagtaaaccaatcttctgtctttatagcccagcaaagtctaccttctcttcataccacagatatgaatatggacagggaccttccattattcctgctatctaggaataacttacatttgggtggcattactaaatttttcaagttcatctcacaagggctaagggagtattagacacaacagtgtgggatctttgcactgagttttaaaagcccactgtggaaatcagtgcactacgttctcagcactcaggactacccacactcagaagtctgcagttgccttccacagatgttagtagcattgatgagccaggctccgcctgaattaggtctctacccaacagtttgtaccttcgtaatactgtttgcaagataagaaagaaaagaaacagcaacaaaacacaacacctaacatggccactccccatcatgagatataaaactaccctcttattatgtggtgtcttaaagagacacttttgtgccctttctttggctatatagactgttgagacagtgaaccacaagaaattggaattccctcaggaatttcatggcaggagaaggaaaaggctgaagcctggtgccagccagaggaggaacttgtcttctggaaagatgtcacgtacctctcaggacaaacaggaacccagacaacagtggtgggcaggaccacagcttgatctgcttagttaggtatacctcgtgccttctatttaaacctgaacctcatgccaggacccagcatgaattctgcaggatggtgggggaggggtgggaatccagagacctgtttattcctcttcccaaagtgactacattcaaggaatctttttgtgcttttcaaaggatattacactattactgagcgctgatggctagcatatggtgatgatggttagaaaactccttgctgttctgtgtcatagaacctgtgatgatcattagccagaaatcaactttccaaccttcccaatggcaataagatgtgggtctaggaactctttagaactaagccctaaacgttttctgattctttactttgtaatgcacatgtcttgtattatttttaataatagtgttatttttaattaaacatgatttttgaggtgaaactgaataaaatcacttaatactgaaaaaaaaaaaaaaa

SEQ ID NO: 275 - DNA, 2864 bp, Mus musculus
gtaagggcggaaggggacgcggagcggtcgcgtgcgcggagagcagctctgggcgccgggcggttgctgcgggcgctcaggggccctgggaacaatggcgctgtgcgcgcgggccgcgctgctgctgggcgtgctgcaggtgctggcgctgctaggggcggcgcaggacccgaccgacgctcagggctctgcaagtggaaaccactcagtgctgacctccaatattaacataacagagaataccaaccagaccatgagtgtggtttccaaccagaccagtgaaatgcagagcaccgcgaagccttccgtactgccaaaaactaccacacttatcactgtgaaacctgcaactattgttaaaatatcaaccccaggagtcttaccacatgtgacgcctactgcctcaaagtctacacccaatgcaagtgcttctccaaactctacccacacgtcagcatccatgacaaccccagcccacagtagtttattgacaactgtaacggtttcagcaactactcatcccaccaaaggcaaaggatccaagtttgatgccggcagctttgttggtggtatagtgttaacactgggagttttatctattctctacattggatgcaaaatgtattattcaagaagaggcattcggtaccgaagcattgacgaacatgatgccatcatttaaagtacttcagtggtcaaggaaagaagaaagactgcagccttatcaattattttggtttatattagtttaaactattattttcttggaagtagtataaacaagtcatgcatataatgagcagtgtattccatgaatatctggaaatttctcattactataggtaaagggtatagtctgggtaaaatgaatattgggagctaacaggtcatttatccagtgattgcatttcctttagcaagacaagtcctatcttttggaatatgtgcatggcattgattggtcatgtaggaccaacatcactgagtagcagggcccatctgcatacaggtgaggagcctgtcacagcatcccggatctcagtatcttctctgctcacataaagcacttgagtgccagtcagagctgggtgatcctaattcctgcctcaggttccatggttgcgctaaccagctttcaagtgcagttgaagtaagtttcagtattttagggtttagattagagttcatctagaagtagaacttgcagtccaaatacatcccccacgacctcctatgctaacggccaccgagcactgggagctcagacttggctcgtcatctcccttcaactgtcaggattggtatttcttcctttgtacataatttaggcaagctgcagtgcacacccagcttctcaaaaggcgtagcacatgaagactgctgccatgctgctgtggaaacctgtcccagcattgcaaactggtcttcacggtcacttgtcagctgagttctagtgaatgtcttttaggcaatgtggagctgcttcccatagttagaatttttttaattgaatcagaaatgccatttttaaaaaagctccgtgatatgacgtcccacccagtgtttagaagtctatattgaccggcatcctgcttgttaagccaggaattgtaaagcccaggcctttgaacccacagggtacaaatgcagtatttttgtacactgtcaacttagtcagatttgagaaaatgacttttttatactaaagtgtattttggtgaattctggtttccttatccccaagcctactccttacccttggaaagagagctgcatcctgatatttccagggaagcagccacgctgtctgtggcactgtaagttctaaagtttatactcaggtcaaactcagggccaggtttaacaaagaaagtgtttagttacaaaatactaatatagtatgctattgtaaaaggacaaagtgaattatagcaatttcaaaaagtatagaaataagccaaaaatatctgaatgagcacacatctatgttagaattaaaaatgtaagtataacttttgtaatctgcttctggttttcaaaacaacaaactaccaagaatttttttatatataagaatcatttctacttgctttacatcgggtccaactgacatggtgaggcatggactgctcaggttatgttaacacggagagagatgctaggaaatggaccatggaattagactagtttcaaatgagggctgctgagaaagccacacttctcattggctttcagccactgctctgctttctatgtgaaatacagttcagggcctgggggcaacagggtggtgaaagtttaactttgtttgtctgttacattcttggtacttcagtacctgccagagatcctcttgaacacttgtttctttagcactttggagatataaaccactttataaaggcactgttattatttgcctcttacatttccactgagttgggggttaaaagtaatttacttattatcttttctaatttgttactttcaaataccaggactttgttgaagagacttctttttaatgtataaaaattgaatgtttcctaagcataagttgtcttccaagtctcacttaagcaaatgcttacctttcctagctttcctagagaatgtgtttattaagataaaacaatgaataaatccataggaggactaattcaaatatgacagttggcaacatattttatggtgtggtaattttgtatcttgagaaagactaaagcaaacccttattgccctttttctattttaacgaccaattttggtatttcattgttactaagatctatttttagaataaaatttgttctccattcaaaaaaaaaaaaaaaaaaaaaaaaaaaaaaaaaaaaaaaaaaaaa

SEQ ID NO: 276 - DNA, 1679 bp, Mus musculus
cgcacagcccggtgcagcggcgtgctcggacctcgcgtgctcgggatggccggctacctgcgggctgtgagctcgctctgcagagcctcgggctcagcgcggacctgggcaccggcagcactgactgtccccagctggccggagcagccgcggcgccactatgctgagaagaggatcaaggtggagaagccggtagtggagatggacggtgacgagatgacccggatcatctggcagttcatcaaggagaagctcatcctgcctcacgtggatgttcagctcaagtattttgaccttgggcttccaaaccgtgaccagaccaatgaccaggtcaccattgactctgctctggccacccagaagtacagtgtggctgtcaagtgtgccacaatcacccctgatgaggcccgtgtggaagagttcaagctgaagaaaatgtggaagagccctaacggaacgatccggaacatccttgggggaaccgtcttcagagagccaatcatctgcaaaaacatcccccgccttgtccctggctggaccaagcccatcaccattggcaggcacgcccatggcgaccagtacaaggccacagattttgtggtagatcgagctggcacgttcaagttggtcttcaccccaaaggatggcagcagtgccaaggagtgggaggtgtataacttccctgccggaggcgttgggatggggatgtacaacaccgacgagtccatttcgggcttcgcgcacagctgcttccagtactctatccagaagaaatggccgctctacttgagcaccaagaacaccattctgaaggcctatgacgggcgtttcaaggacatcttccaggagatctttgacaagcactataagactgacttcgacaggaataagatctggtatgaacatcggctcatcgacgacatggtggcccaggtgctcaagtcttccggtggctttgtgtgggcttgcaaaaactatgatggagacgtgcagtctgacatcctggctcaaggctttggctccctcggcctgatgacatctgtgctggtctgccctgatgggaagacaattgaggctgaggctgctcatgggacagtcacccgccattaccgagaacaccagaagggccggcccaccagtaccaaccctattgccagcatctttgcctggacacggggtctggagcatcgtgggaagctggatgggaaccaggaccttatcaggtttgcacagacgctggagaaggtgtgcgtgcagactgtggagagcggagcgatgaccaaggacctggctggctgtatccatggcctcagcaatgtgaagctgaacgagcacttcctgaacaccacagacttcctggacaccattaagagcaacctggacagagctctgggcaagcagtaggggtggacactactcagctccagtgggtactctgtacatggcagagggtgggcctcacagccctctctggtggcctttctagggacatttttttacatatatatatgatggagatgttttttaaagtatatgagcattttcctcacggtggacatgaggcaggaacgtgtgctttacctcagacagtcagtgttctgcatactgtaatttatattgctctggaatcacatggtgccatatttagctactaaaaagctcttcgcaaaaaaaaaaaa

SEQ ID NO: 277 - DNA, 4108 bp, Mus musculus
ccacgcgttccgaccgaggcgcgtgaggtgggcggcggccagcggagcctctgcggggaaagaaggagccgggtccacagcctgaggagacgcagaggcagggcagccccggggagggagccggctgcagaggaagatgcccggaaccgacctcctcaagctgaaggacttcgagccttatttggagattttggaatcatattccacaaaagccaagaattatgtgaatggatattgcaccaaatatgagccctggcagctcattgcgtggagtgtcctgtgtactctgctgatagtctgggtgtatgagcttatcttccagccagagagtttatggtctcggtttaaaaaaaaattatttaagcttatcaggaagatgccatttattggacgtaagatcgaacaacaggtgagcaaagccaagaaggatcttgtcaagaacatgccattcctaaaggtggacaaggattatgtgaaaactctgcctgctcagggtatgggcacagctgaggttctggagagactcaaggagtacagctccatggatggttcctggcaagaagggaaagcctcaggagctgtgtacaatggggaaccgaagctcacggagctgctggtgcaggcttatggagaattcacgtggagcaatccactgcatccagatatcttccctggattgcggaagttagaggcagaaatcgttaggatgacttgttccctcttcaatgggggaccagattcctgtggatgtgtgacttctgggggaacggaaagcatcctgatggcctgcaaagcttaccgggacttggcgttagagaaggggatcaaaactccagaaattgtggctcccgagagtgcccatgctgcattcgacaaagcagctcattattttgggatgaagattgtccgagttgcactgaaaaagaacatggaggtggatgtgcaggcaatgaagagagccatctccaggaacacagctatgctggtctgttctaccccacagtttcctcatggtgtgatggatcctgtccccgaagtggccaagttggctgtcagatataaaatcccactccatgtggatgcttgtctggggggcttcctcattgtcttcatggagaaagcagggtacccactggagaaaccatttgatttccgggtgaaaggtgtgaccagcatttcagcagatactcataagtatggctatgctcctaaaggttcatcagtggtgatgtactctaacgagaagtacaggacgtaccagttctttgttggtgcagactggcaaggtggtgtctacgcatctccaagcatagctggctcacggcctggtggcatcattgcagcctgttgggccgccttgatgcacttcggtgagaacggctatgttgaagctaccaaacagatcatcaaaactgctcgcttcctgaagtcagaactggaaaacatcaaaaacatcttcattttcggtgatcctcaattgtcagttattgctctgggatccaacgattttgacatttaccgactatctaatatgatgtctgctaaggggtggaattttaactacctgcagttcccaagaagcattcatttctgcattacgttagtacatactcggaagcgagtggcgatccagttcctaaaggatatccgggaatcagtcacacaaatcatgaagaatcctaaagctaagaccacaggaatgggtgccatctatggcatggcccaggcaaccattgacaggaagctggttgcagaaatatcctccgtcttcttggactgcctttatactacggaccccgtgactcagggcaaccagatgaacggttctccaaagccccgctgaactttgacccttgtgagttccttggagcttcaggccttcagaaggttcttggcgtttggaacagactgcacacaatttgacatctggactggctccgtagagcacaataggataaaccataagatagcttcagcctcaggactcctttgtttccttgtggggcttttagtttgaagaccctgaaggatcccactgcatagtgagtctgtcctggttattaatgttaccctagaaattgctttaaccttatttttctctaacgtctttagcatcgtctttacttaatcattgtgtggtggctccgacctgtcctgattatttagggaaagtgtgagatagcaagagggtgtctctgctgcctcagtggggtgttctggccatcaggcaggaagcagttatgtaccgtgttccctcaggtgggtgtctgtctgtcccacgcagggggaggttcagcctctgcttcaggagatgcctcttgtcctcaggatcactgtcattacagcttgctttacttttccaagcacacgtcggccagactactggcctctttttttgttttatttttaaataactggagtatattcccttggcagggtttgaagtgctcctttgtcttgtgcatgaccatggctgctgccatctttggagatgcctgttggcagtcatatacttgtttgttcttattactgtagggtaagaaatgaacatgtttttcagagaatctagggctttctggctgttggcactgcctctctggatggagtaggggtagatcactcctgagccctctcctgggccagaggagccacaaccagaccctttcccacattttcgtgaatagccacataggtaagcgcctacatcctgcacatgtgggcagtagtcttccccttggacattgccttaagccttcatgtaatgagaatctgcttttattgaagaaaacactccacaagtgtccttgacttcctcattgggtgtgaagatgtgcagaggacacttgctccatcagtgtgtgttcttcctgccccttccccccttattcagcttccaaaggtacgacagcattttagcttcaggtactggacgttcctcaggccccgctaaaaggaagcagacattttggagtagaaagggatggctacagccattacacttggggcctggggttccttcttaagactgattgcccagggctatacagggacaggaccaatccctggccaatttcccatttgcttctcccttttagggattgggggctctgaagtaggcagagccccgttcagctctgatgaccgtaccatgtgcctttctacccattcagtgagtgacaaccctcgtcctcacccaggccctggcagaagtagaccactctttgaggtgtgtctgcttataggagagaacttgggacagatcaccagaagccatgctctgttccttccccttctcagggattcctgagtattcagcctgggcattgctcgctgggagagccagaccaccaggctcttcctcaccctccttaggaagtggtcttcagcactgttctgaccccaggtgttaccagctggttcatcacagggcatgtgtatatgtccacttccctcctgtatgctctacagtgcattatgaggctcagggatggttggtgtgtcagagagaggctgaattcctgagtgtacacattaacagtggttagactgttggactcctctgggcctcctctctggcttacaagtggctaaaatggagaagcatcctttatagtctcagcagagccagggaccaagccgctcccttcctttgtggtagcactagcatggggtgctggtgtttttcagagggacccgctgcagccattttaattcatgattaggaaccttagtgtgacttaagagtttcattgtgtgtttatgtgtgcatgacatgcctagtcagtgacaggggtgggtagggtgtctagtatcatggtatcacgtggcttagtagatgccacagtagcttctgcaaacactgtactgtcttgtttctgtattagatgtcggtaatcatgtgaatatactgccatgtcacttttaatattaccagttttatacttggaaaatggtacttgcctctttgaaatctattttgtctctaatgtccctaccatctctatgttctttcctaactgcagcaataacccttcaaaagcaattgaataataaatgtcccaaactgtaaaaaaaaaaaaaaaaaaaaaaaaaaaaaaaaaaaaaaaaa

SEQ ID NO: 278 - DNA, 2958 bp, Mus musculus
ttttttttttttggtggggagggagcagcaaagtgttaacaaagtggaccatacacttaataactttgtaaactacatgtatttgctaaaactcatggattctcattgtaacatgagtcagagcacaatatttgcatgacaccttgtaacttagtgtttcagcacactgtaatgtaagcttgcagagaaagttcagttctgtgctcacaggaaatgttccatattccccagtgtaccttcatgctgtcttatgaagcctttctcagctgctttggaaaaattttatcagcagagcagtctatccactcagtatttctaccatctgggtccaacagaaacaatagctacatatctttctcatgttaaatataaaaatgcataatgtctagagtatcatctgtatttaacattgtttctgttataaatggtactcatgagccatcaacatagctacattagatttctcctaatggaatgatagttttgctcactataatataaatgccaatattaagaaaatacaactgtttctcagtgaaaaatcaccaaatttgaaactcaagttcccatctgagtctatagaaaccatcaggcctgacaaaaagattcttcctagatgacatgatcaaggaaatttatacttctctcatggggagagtctaacataacagactcatttataatagctttactgaagatgaaagggcatacagtggtgttcaataattggtactatgtaaaaaaatgtacacacacatgcatgagctttgggaagacacacgtgtatccataagtatactaaaagatgagtgtccatattcagcgttgagggcatggttatttctttataactaatggttacatgtattatttcattttcaaatgtgcaaatgcctgtagaaatgatgtctctgaacaagtcatttaaccttaggcaatggagtatatttactgccctacagtagagttttcaccttcagtcttacagtgcttttactgtacagtctccatttctgttttttagttaatatctgatgtcaaatacagcaaaagtgtttgtttttgtctgacttgatataattgctgaccatagctttctgaaatagatatcatcataaaccaaataggactaagccctagattccagagtctggtaatttataataagtttaaaacacttcttttaaaatgacaaattgattattaaaacttatttagaaaatagctcaagatagcagtaaaatccagtagtaggacgttgattatggccaggtactaacctggccaaaatgctgatgatgccaggcctagtagtgcaggcacctaggaggccgacggaggaggagagcaagctggagtctagcctgggtaacatagcaagaccccggctcaaaacaaaacagaacagggcccagggctattgttgtcagagtatgtacctagcacatatgagatccgggcaacacaagaaatgatcctaactccaaaacaatacttagttttatatatatcaagtatcatgattcagtgattgagcttagctgtcaaggccacagaattagttataattattttaaatgagtaaattgaaaatgtagagagtttgaaacagttctccattatacagaattacagagttgagggtcctacctccatagcaactaatctttacactaaataaggaaaaggcagttctgaagtatgtgtacataaatagttcattttgtaaaaacgtgtgtgtatggatatccatacacacacacacaaagctacatgtataatacgtagcattcttccaaaatttatgaataataaagctagatatatttgcccacatgttacagctagtattctaagatctttgattactttcagatttgtagatattctggccctatatgaggttctcttaagaggctttggctccaccttggagctgacactaattccctttctgaatattctgtttattagagaaactaagttcagaaaattgttacttactattagaatttaattttctttttaacaaaaaacagatttttgcatggaggcctcttgggaaatatttccttaaattttccagtgaaaaatttttgatatgatttagacttaaagattacagtgcctgccctcctcttgttccaagggatttgctgtgagaattcttataacatctgtaatgtatttggagttcttgggagaaatttagtattttaaataatgagattattgtatataactgaatatacacagattttttaagaatacatttgatgaaaaattcagcatcatattggtctttctgtaagtatatgtgatatacctgaagaagatgataattctctaattgtttaaggtaaggttatttttaaattgtatttttgttttagcttttaaagttatattcttttaaaaatatttatcatatttccatcttactactttgaatcctggagtaacttttgaaaaactcaaagaattaacacatccttagtggactaaaaaatgagagactagccgggtgcaagtggcacacacctttatccgagcacttgggaggcagaggaggtgggtctctgagttcaaggccagcctggtctacagatcaggttctggggtagccggaactgttgcacagagaaactccgtctttggagagaaaagtgcgatcatgatgcttttctaaggtaagcacggtgggtttgtaccacttgggcaaacactacaagaatgtcttaaaagtcatcttgtgtgataagagtaaaagtggtttctctgcttctgatgaccagcatcccactgctggctgatttaataacatttactctcactttaccttctgtatgttaagtagggctaaggtaagacttgtcttcatcttaaactctgaggaggaactgattgtgcttcgatgataaggctttgagactacttattaaatgtgttctcttaccc

SEQ ID NO: 279 - DNA, 5011 bp, Mus musculus
ctgggccagtgacgctggcgcagccgtcgccaccgccgccgcgttccatcctcaggagccggccaccgctcgcgtcctcgtcctcgtcctcctccttcgtcagcgcccggccgcgtgagccagaccagggcacgcgaggcgtcgcgggggacccgacagggagtgcaggcaggcgggcgcgctcagcggcggagcgggttcggcgacgcgggagctgctagcgccccctttcccggaggtctcggcgccgctcccgggtgaagctactcctggctggctttaggattcttctggattttaaagtcgttctttttaaaaataaataaataaataaaaacctccgacggataaaagatgtgccatggcaagatagcaccaaagagcagctcagagtttgttgtgacttctgtggggcatggagtgtttcttcaactggtgatcctttgcgctctgctgggagatggattagcctctgtgtgtcctctgcccccagagccagagaatggtggctacatttgccacccccggccttgtaaagaccccttgacagcaggcagtgtcatcgagtacctgtgtgcagaaggctacatgttgaagggtgactacaaatacctgacctgcaaaaatggcgagtggacgccagccatggaggttagctgtcatctcattgaagacaaagaaacccatgcacttggggtccctgcgctgtccatagtggcttccactgccagctctgtggcactcattctcctcctcgtggtgctgtttgtactgctgcagccaaagctgaagtctttccatcatagcaggcgtgaacagggggtttctggggatcaagtctccattatggtggatggtgtccaggttgcactaccttcatatgaggaagctgtgtatggaagttctggtcactgcatgccaccagctgatcccagagtacagattgttctgtcggaagggtctgcacctagtgggaggaacatgccaagggaacagcagctgcaaggccaggaggcctgctcttctgcaggtggagaggacgaggccccgggccattctgggctgtgtgaagcctggggttcccagggctcagagactgtgatggtgcatcaggcaaccacatcttcctgggtggccggctcagggagcagccggccgacacacaaagacactgcagattcagaaaacagtgacatacaaagccttttatccctcacatcagaggagtacacagatgatatcccactattgaaagaagcatgagggctgccgctggcctctgtcctctctgcccgtcctctctcttcctgtgggtttgagtaccatgtcctctctagctgccccacctggatgcctgaactgccacctgtgtatctctgtgtacctgagagcctgcaggccacctcgatggatactcaagaaagattctcaccatctgcccactggacagctggaggacctggccctttgcctggcccagccttcccatctgtctgtcagggatgtgtctgaatgcgctggattgaacctccccttcccctcagcctctgggtcccttccagccagctcttggtggcagccccgcagccatgagggcctgagcactgctgtgtttacttgtgccttccccaccctgtccaggttccctgttgtgcaggtgggttgctatccacaggccttagtggctactgccacctgtacccgggggccaggcctgaggctgcagaaacagattgaagagtagtaaggcactcaaagcaggaatagctcatgctgggtccagaatgtgggtccctgagcttgccctgtgtgttgacactgatggcggcatcttccttaactgaggacagaggtttgggaagtcatgccaaagccacccagcactcgctgaccagctctcgtgcaggttcctggctcttttgagagtttctaagaagcacccagaagacctgtgggaaggaggaaaggtgtcagataatgattgtcttcctaatactcaagttctcacttcctgcttccagcactggctgccttggccttggtttctgttcctggataaggggaagttgcatgctgtttcctggactttgtcctaggtagctctggcttccttgcagcccacagaatcctgagatttgctgagatgccaacaaaagctcatctggcttttggcagtctgggcaagttgcccctttttaggtttgtggtgatggaggggaggctgataggtacagaccaagtccccggtggctgcaggcagctccggcaggtcctgaggatcctcctcaccacggtcatgtgccttagtaactgtgcccaggaagtggcctgctgtgccactgctcccactctgttctctcctccctgcctttccacacgtcatcgttgaaaagccactccttattttccctgccagctgatagagatggtgggcacccagaaacctgagatacaggtcctgggagtgggaacgtactagcctagaagaaatgctccagccatttccagcctcctattgccctgtactgaatgctgacaagtctgggtaactgagccccaccaggcttctaccatcttgagaagacagatgtggtatcaaggaatgtgtgtgttttttttttttcttctcatctttcttcctttcttccttttcttcctcttcttcttcttcttctttctcctcctcaagccttggggctgggaaactcttcagagccagtcctggactgaacctgtgatgagcctctctggggtggtaaaaataataaaagcccagtatatttatagttcctgacacaacagggttagctccaggcatctgtggcctcaaaaataggggaataacttctcctagccaactgcctccattcacaatgcactttagtccctgtcatgcctggcttcctgacaccctcatctcctctcagggtaagggcagtgtctgctgtccctgctggccactcccacactaacccaggaggccagtccagtgtgcccagtgtccagacaagtatggttggctgaggaatgagctggaaaaggtgcttagactagacgactagaacacccctagcaggtgctgccataggcttacctgggggtgggttccaaggccccaagccacctcaccatggcgcttcttcagcttcagtggtgtccacccccctcaagggagaactgggcaaggaacacgagtcttctgaatgggcctgcctcttttgcttactgctcttctaaaatctgagttctgttttagttctgtgtcgttaccctgggcttttgccccttacagattgcacttctttggcttattatttagccttgtaggtgcctggctttggccttgggaaaaagaacctcctggtgcctcgttttctctcagcattcattagcctgctgtggggaaatcacaggcccaggcttgcctaactgaaggataaagggcacccgtgttccccatcctcttgtcacaggcttttagaaggtctgttcttgaggtctcacacctgttgctggcatctgtggcttcttcctgcattgttttcttctacagcaatttcttaaccattagccatgtgctgtggtttctggggcatctgggctttgtccattacagacggactggggacttaattgccttgaagtggagcctgctagaaacagggtcagtggcaggtggcaggcggatgggcaggaagaagcttcgagcaagtgggaagaaactaagcagcctactttactgggctcacctccagggacatcctgagacttgtccaaaagaggcagtcagcaccaaaggacttttacacagggttttttggtttgggagatgtttttgctttttcatacttacactgactcaatgcaggttttatatcctggtgacttgctgtcacattctatcagttttcaagggccagaatgatgaaataaataaatagaaaattccgtccttccatgccttagtttaacaggtgagctctacctgcccagttctgtgttttgtgtgagaactgtgaaatgggcggagtcctgaccactttgtgggttcgtttggttttataaggcatttcaatgtacattcttcaagcactccatttgcaaagagaacttaaagtcatactgtcttccccattcatcctgccctccttgcacccccagctttacagttctgtaaagaagccaggctacaagacagacaaaggtatatttttcctgctttgagagtggccaagttgggatagatggcagttggcctttttcctcccagtcctatcagagctcttgagtcacttggcttcctgcataacaatatctcctctgttctgaggaacattctagcatagaaaatggaatatgctgcaaacatttctagatccttcctcccttccccctccttaaagaacaaagaagggacacacagcatgcctaccacacagcttcattccaggtatgcttgcgcctgacagtacagctagagccttctctgtggggcctgctgggtctcctgcagccttagagaatattttacttggcattttactaggcagttgaaaacctagtagagtttgaacaaagcgcaccccaccccacccgtccttcacccagcagcagagctcaccatgagggtgcagagtagagcacttggattgccaagtagggagaggaagtagttgagggttgcatggctgtatccacactggcctggcttcttaaggctgtgcaccactatgggatcctttgcagaatggtactcataaaatggtttaaacaacacatgcttaattgactgtgcaggatgtcaatcaatctgggtttgctttattttattttatatatatattttttggtatcctgtacattgcagtgggtatgaagatagtattttaatatttgtacaaagtttaatttaattttaattgttctatgtatataactgcatttctaaataataataaaaattcttatgaaggcaaaaaaaaaaaaaaaaaaaaaaaaaaaaaaaaaaaaa

SEQ ID NO: 280 - DNA, 2872 bp, Mus musculus
cccacgcgtccgctcggcccactcgaccctctcgggcctcggctactcgggctgctgcggcgaagatggcggcgccggcggctcctgcggcaggggaaacgggccccgatgctcgtctggaggccgccttggccgacgtgccggagctggcccgactcctggagattgacccgtacctgaagcccttcgccgcggacttccagcgcaggtataagaagtttagccaggttttgcatgacattggagagaatgaaggtgggatcgataagttctccagaggctatgagtcatttggcatccacagatgttctgatggtggcatctactgcaaagaatgggccccaggagcagaaggagtttttcttactggagaattcagtggttggaatccattttctcacccatataaaaagctggaatacggaaaatgggagctgtatatcccacccaagcagaacaaatcccccctgatacctcatgggtccaagctgaaggtagttattactagtaagagtggcgagatactgtatcgcatttccccatgggcaaagtatgtggttcgtgagaacaacaacgtgaactatgattggatacactgggctccagaagacccctataaattcaagcattccagacctaagaaaccaagaagcctaagaatttatgaatctcatgtgggaatttcttcccacgaaggaaaaatagcttcttacaaacattttaccagcaatgtactaccaagaatcaaagaccttgggtataactgcattcagttgatggcgatcatggaacatgcttactatgccagttttgggtaccaaatcacgagcttttttgcagcttcaagtcgttatggaactcctgaagagctgaaagaacttgttgacacagcacattcgatgggcattgtagtcctcctagatgtggttcatagccatgcttcaaaaaattcagaagatgggttaaacatgtttgatgggaccgattcctgttattttcactctggaccccgagggacccatgatctttgggacagtagattatttatctattccagctgggaagttttaagattccttctgtcgaacataagatggtggttggaggagtactgctttgatggcttccgttttgatggtgtcacctctatgctctatcatcaccacggaatgggtcaaggtttttcgggtgactataatgaatattttggactacaagtagatgaagatgctttgatttatctcatgttggcaaatcatttggctcacacgttgtacccagactcgataacaatagcagaggatgtatcagggatgccggctctctgttctccaacttcccagggaggcggtggttttgactacagattagcaatggctattccagataaatggatccaattacttaaggaatttaaagatgaagactggaatatgggcaatatagtgtatactctcaccaatcgacgctaccttgaaaaatgtgtggcttatgcagagagtcatgatcaggcattggttggtgacaagacactggcgttttggttgatggacgctgagatgtacacgaacatgagcgttctggcccctttcactccagtaattgatcgaggaatacagcttcataagatgattcgtctcatcactcacgggctcggtggagaaggctatctcaatttcatgggtaatgagtttgggcatcctgaatggttggacttcccaaggaaaggaaataatgagagttaccattatgccagaaggcagtttaatttaaccgacgatgaccttcttcgctataagttcctaaataactttgacagagatatgaatagactggaagaaagatgtggttggctttcagctccacaggcctacgtgagtgaaaaacatgaagccaataagacaatcacctttgagagagcaggacttctctttattttcaacttccacccaagcaagagctatacggactaccgagtcgggacagcaacaccagggaagttcaaaattgtactagattctgacgcagcggagtatggaggtcatcagagactggaccacaacaccaactactttgctgaggcttttgaacataatgggcgcccctattctcttctggtgtacattccaagccgagtggctctcatccttcagaatgtggatctgcaaaactgaagagacctacactcagcccatctcacgccgacgtgttgccgctgatccccctcacagtgttgatagcgtgtaagctttgcaaaacactgctgtctagccaaaacatcaggctggaactcagcgttggaatacgcaaacatataagttgcttatgaaggatgtgcttaaaatattagcaacgtctatttcaaagccatccaagaaattaggatttgcaaatgaagtgtagcacatgataatttttaaatattacttttctggcaaagcattcgattctttcattttaaatttgaattattcatcaggcatgattattttggctgtagtaaaaatattttttgagatagatatttggtggccttatttgttctatatctacttgtcttaatgatgaggtactgagtttgtttctttgctgtgttttttaattgtgtttagaaatactgtattaaacacatagcactaatataaaatgagaatcttataaaagatgatataaaaattcgtatctgtgcctcactttgcattaagttctatcttgtactctcctgtccgtatactgtttcagtagacgctgatatttcactcttctgaagacttgaagtggtcattgtagcatttctgataatgtctttcactttcatcaataaaaagaaaaatgccaaattgcaaaaaaaaaaaaaaaaaaaaaaaaaaaa

SEQ ID NO: 281 - DNA, 1093 bp, Mus musculus
gggaggaagtgggaaggaaggcgctgaggagcgagcaagcgcgcacgcccagcccagctaccgactgacttcaccacctcaccgacacccacttggacacccactcggctggccagcactccacactgacgggaccctggctgcacccgccgtgatctctttgaactaggatagcccgcgctgtctcccccaagatggaaatcccacccacccactatgctgcgtccagggccgcctcggtggcggagaactgcattaactaccagcaggggactccccacaagctgttcctggtgcagacggtccagcaggccagcaaggaggatatcccaggaagagggcacaagtaccatcttaagttttctgtggaagaaattatccaaaaacaagttacagtgaactgcacagctgaagttctttacccccaaatgggacaaggctctgcaccagaagtcaacttcacattcgaaggagaaatcggcaagaacccagatgaggaagataacacattttatcaaagcctcatgtctctgaagagaccgctggaagcacaggacatcccagacaattttggaaatgtgtctccacaaatgaagccagtccagcacttagcctgggtcgcctgcggttatgtaatgtggcagaattcgactgaagacacatggtataaaatgttaaaaattcagacggtcaagcaagtgcaaagaaacgatgacttcattgagttagattacaccattctactccacgacattgcatcgcaggagattattccctggcaaatgcaagtcctgtggcatccacagtacggcacaaaagtaaaacacaacagccgcctcccaaaggaagggcaggcggagtgaacaagacgctaacccgtagacaaccgtcagcatgctcgctaaccacgtgtgtgactggcctcactggcatctagcctaacgggccaaaggaataccagtgtcactctttatgtcttggctacagtaccgagctgcatagattccataataaagaatagtactacctaaaaatgtctttccaacagtaatggtactatgtctatcccctaataaaacttcacttcagcctc

SEQ ID NO: 282 - DNA, 1469 bp, Mus musculus
atggcgccgggcaagctgctcctgctgttggcggccgccctggccccgactcagacccgcgcgggcccacactcgatgaggtatttcgagaccgccgtgtcccggcccggcctcggggagccccggtacatctctgtcggctacgtggacaacacggagttcgtgcgcttcgacagcgacgcggagaatccgagagatgagccgcgggtgcggtggatggagcaggaggggccggagtattgggagcgggagacacagaaatccaagagcaatgagcagtggttccgagtgagcctgaggaccgcgctgcgctactacaaccagagcgagagcggctctcacacgttccaggggatgtacggctgtgaggtggggtcggactggcgcctcctccgcgggtacgagcaggtcgcatacgacggccgcgattacatcgccctgaacgaagacctgaaaacgtggacagcggcggacatggcggcgctgatcaccaaacacaagtgggagcaggctggtgctgcagagagagaccgggcctacctggagggcgagtgcgtggagtggctccgcagatacctggagctcgggaacgcgacgctgctgcgcacagattccccaaaggcccatgtgactcatcaccccagatctgaagattatgtcaccctgaggtgctgggccctgggcttctaccctgctgacatcaccctgacctggcagttgaatggggaggagctgacccaggacatggagcttgtggagaccaggcctgcaggggatggaaccttccagaagtgggcatctgtggtggtgcctcgtgggaaggagcagaattacacatgccatgtgcaccatgaggggctgcctgagcccctcaccctgagatgggagcctcctccatccactgactcttacatggtgatcattgctgttctgggtgtccttggagctctggccatctttggagctgtggtggcttttgtgaggaggaggaggaggagaaacacaggtggaaaaggaggggactatactctggctccaggctcccagagctctgatatgtctctcccagattgtaaagtgatggttgatgacccacattctctagcatgaagacagctgccgggtgtggacttggtgacaatgtcttctcatatctcctgtgacatccagagccctcagttctctttagtcaagtgtgtgatgttccctatgagcctatgggctcaatgtgaagaatgatggagcccagtctacccctgcacaccaggaccctgtccctgcgctgttctgtcttcccttccacagccaaccgtgctggttcagccaaacactgggggacatctgcagcctgtcagctccatgctaccctgacctgcagctcctcacttccacactgagaataataatttgaatatgaccttgattgttatcattgtgacctagggctgatttcttgttaagcttctaga

SEQ ID NO: 283 - DNA, 2160 bp, Mus musculus
gggaacgctggggacgcgtccgttgtggggactgaacccagatgtcacttgtgactgaggctccacggttcccaggggctcctttcaggactcatagaaacctcctgcaccttggtgatggcacagagggactgttatttttccttggaacctgaatgactgctgagaaggaaggcgaaaataaagtgcttgtctctcctggtgacttcgggccgcagcgcaggctgtcgtattgagccccttttagaacccgaggacaagacccgcctgaacatgagtcatgagtgaaacatcttgctctttttttattgagaaagaatttcaagatgggcagctagaaaatgtctctgctgggctctcttcatcgtacaaggacaagggtgcactcatggctttcagaggaattcctatctccgagctgacgaaccatggcattctccaggccctgacggcagaaaccaatgggtggcagccaggtgttgtgagtgaagaggtcctcagagcccaggaagagtgggaagtggtggacaccatccatccagacatagagagtggagtccactgccagcagcctggccagctcatctccttcaacgaggccctggagcacttccagagtgtggacctttcctctttcaagaaaagaatccagcccactattcaaaggactgggctcgccgccctccggcattgccttttcgggccgccaaagctgcaccagggtcttcgggaagaaagagacttggttctcaccattgctcagtgtggcctggacagccaaaacccaacgcatggccgagtgctccagaccatctacaagaagctgactggctccaagttcgactgtgcccttcacggagaccattgggaagacctgggcttccagggagcaaacccagccacagacctccggggggcaggcttcctggccctcctgcacctactctacctggtcatggactcaaagacgtttctgatggcccaggagatcttccgcctgtctcatcaccatatccagcaattccccttctgtttgatgtctgtgaacatcacccgcattgccatccaggccttgagagaggagtgtctctccagggagtgtaatcggcggcagaaggtcatcccggtggtgaacagcttctacgcggctactttccttcatctggctcgcgtgtggaggacccagcagaagactattttagactcaggctttgtcctcaaagacttggaagcgttggccaagaagagcccaaaacgactgctcaagaccctggatgactacctcgcccaggtgtcaaagggacagacctccttgttggaggcacacaagcgccctggatcacagggacctcactccagggatctcactttcacaggcgtgtgtgacctgcagtctcactcattcgagagtgcagggttgatctgacccaccacggagagaccaggacaggctgggtcgctggggctctctgaactaaagaatcatgtctgggccaaagcccttcgtgcccctgcagatgagactaggaggctcccgggtgtgtgtagtgacacccacgcccacatttctacatcagcagagcacattcaggcagctagaattacccccccatgccgtcctccaagcacggagtcttctgtccttcccagctggactccacttcacagggttggactcctgatatctcagtggaactgaacagagcacagggccagacagccctatcagaattgcctacacgtctgcacctagaggcagagaccctggaagcaacagccaagattctgactcccaacagctgtccccagtgtctgtggttggaattggaaggacagagacagcaatatcttcagccatcagggggcagcacaacacagaaaaagtgactgataggcaggtcctctcttcctccagccaccgatttttcaagacacttgtttccaccctacccttctcctctttcccctccctctcctttgcccaccattgtttgtaatctagaaatgggtactcggctggctagactagtcattgagcgtcccacccccaacgcccacaggctggagcgcctatggagaccactacctatctaccctggctgagaggcaaaggaaactcacccaccagcagttttagaataaaggaattgttgtaatccc

SEQ ID NO: 284 - DNA, 3416 bp, Mus musculus
gccgaggcccagaaatagccgccttggcggttccgccccgcggccggcgagagtcctgggagacagcaggacgcaggctgggcgcggtgtggcccggacgatgctgctgagccccggccgggcccgacccagagcacatgatggcgatacgggagctcaaagtgtgtcttctcggggacacgggggttgggaaatccagcattgtgtgtcgttttgtccaggatcactttgaccacaacatcagccccactattggggcatctttcatgaccaaaaccgtgccttgtggaaatgaacttcacaaattcctcatctgggacaccgctggccaggagcggttccactccctggctcctatgtactaccgaggatctgctgcagccgtcatcgtctatgacatcactaagcaggattcatttcataccttgaaaaaatgggtcaaggagctgaaggagcacggcccagaaaacattgtgatggcgattgctgggaacaagtgtgacctctctgatattagggaggtgcccctgaaggacgctaaggagtacgctgaatccataggtgccatcgtggtggagaccagcgcgaagaatgccattaacatcgaggagctctttcaaggaatcagccgccagatcccacccttgggccctcaggaaaatggaaacagcggcgggatcaagcttgggaatcagagcttgcaagccagccgtcggtgctgctgagccaagggcatggcatacagagtaagaaggaaggagccagagccctctttgttggtgtccagtgcacacacaaggaccccacccgtggggctaactacctgccggagagtgagcagctttgtaccctgggacacctgctgcaggatgctgaacagggacgtttcctgcaaagaaatgatagaaaactctggaaaactcaccaccaccgcaacatggccttcagtttatgaaatgcacacagcaaggcttgtacttgctaggtaatagatatagttgccgttttttttttttttttttgttaaagaggtattagaaaagttttagattggtccacacacctcagagtgctgttctttgctaatttcctatgtcacctaggcaatctcaataatgtctccagggccagggccttcctttctggccagttcaccaaaaggcaaaggctataataggaggttagcgcttagctggctttggaagtaagtctttattagttttctgagggagatcagagatgcacagctggaccactgcttaaactgaaaagtgaactcctgtaagagagacaaaagttgcattagaaaccaccatccctatctcctttcatttatctgatggacatttttctaaggtatggtcatctgtaacccaaccaaatcaaactagaatgttacatataattttggagtggtgggggctgatgaaaagagttaaaattagttgctatataagcagtggtggttggaagatctaaatgggattcggggtacccccaagcatgcacccccctattgcagtgagtttctacttttggggtgatcacttcacagagcattaggagacaatgtcatgatgtcacatctggggatgtttgagcctaaattgtagggaagacttctgttaatagcagctaatcataggttgtagcaaaccaggcagagacatgttaccaccctcaaattctggacccctaaaggtgtgaaatcagaagacatccttaaactttgccaactttggagagaaagggtgtcaaacagtcagtgcccagttcattgacggtgcttgtccgctccaggacgtgagcctcaacatagtcttcctgcttctcccaacttgggagctaattgagtcctagaatacaggggatagcaaatacttgtcctgattcaagagaatcaagactcctacatgtcccatagcaggagtctcactgtcagcaaatggcatctgtatgctgtgccagacttctcaagaccatcagtgcctatcccatgtctccaatatcagcagctgacaggattccccatgctggcaaagacattcgtccactcactacaggtcaaacaaacagagaacgattgagctgaagttgaggtgacctctctcgagtaccaagcttagttttgaatctttccccatttttgaggggaaccttttgccgggagcttgtatttacctggatgacggtctagatttccaagccaaattggtactgttcccaggagaggatgccccagctttggattgggtttgcagtggttgagttttgcatgaactgtctgggcttcaccttgagagtgagctgccctgggttggatcagagaagcattgtgagggtacgaccccttgcttttccccaggctgcatgctgttgatgtcacagccatgcagggggtaagtgtgcacacgtgccaccagcctgagcagagagagacgtggcttgggcacacaactactcacaccactttgagccttctctgcaggtaggtgctaaggcctttgatgcttctcctcttggcttggcattccttttgggatgtttttaaccactgaccctcgacaaagacctagacacgacaattgctccagacataggatgtagtgtccttatggctactccccaaattctgttcccaacccccattttcttatctctcacaggtgagcgggtttgtatatgtgtaaatatggtttttatgtcaactgcacctacatgtaatccattttagagtggctgtgtttggctcgtgaccttgtgcccataagtgaggcacagaatgtcaaagggattctttctcaggagacgtccccaaaggacagtggcagggctgtgcaaatgttttatacaggtacagaattgactcaccatttttttttcattaaaagtggtatattagggtactggatatgacgtcatcttgcagactaacctgcatcctagccaacagcaagggctgtgccccagtaggaatcccgttctttcctgaggttaggtttggaggatcaacatgtttcctccgccataatggactctggcttgtgtaggcttcttgctgctccgtagcattccgggcgaggcgtaaggaggcagtggtggtcagccagggattctggctgtgctcatgtgatcacggctttcaccattgtcgtgacacccagtgactcagcagtcataccgtcacacagactgtcgccctctccggtgtttttgtaaagggtttccacttgggctggacccaggtttggtacctagaagatccttctgcagacaccgaggaccttcgcatcttgtactctgttctctgataacgagtttcgggttggcgctcctttgtatcaattgcttttgattttaacccattggtatgattcctactaataaatattttaagttttaaaaaaaaaaaaaaa

SEQ ID NO: 285 - DNA, 3143 bp, Mus musculus
tccgcgcccggtggatgtgaatcggcggcggcggcggaggaggagtcggtgggccggcgcccggcctgtgggagcgcggaggatgaggccgctgccgggcgctcctggcgtggcggcggccgccgcgttgttgttgctgctgctgccccgggctcggtctgacgagcacgaacacacgtatcaagataaagaagaagttgttttatggatgaatactgttgggccctaccacaatcgccaagaaacatataaatacttttcacttccattctgtgtggggtcaaaaaaaagtatcagtcattaccatgaaactttgggagaagcacttcaaggagttgaattagaatttagtggcctggacattaaatttaaagatgatgtgatgccaggcacttactgtgaaattgacttagataaagagaagagagatgcgtttgtgtatgctatcaagaatcactattggtatcagatgtacatagatgacttaccaatatggggtattgttggtgaagcagatgaaaatggggaagattactatctttggacctacaaaaaacttgaaataggctttaatggaaatcgaattgttgatgttaatctaactagtgaaggaaaggtcaagctggttccaaatactaaaatacagatgtcatattcggtaaaatggaaaaaatcggatgtaaaatttgaagatcgattcgataaatatcttgatccatccttttttcagcataggattcactggttttcaatttttaattccttcatgatggtgatcttcttagtgggattagtttcaatgattttaatgagaactttaaggaaagattatgcccgatacagtaaagaagaagaaatggatgacatggacagagacctaggagacgagtatggctggaagcaggtgcatggagatgtgttcagaccgtcaagtcaccctctgatcttctcctccctcattggctctggatgtcagatatttgctgtgtctctcattgttattattgttgccatgatagaggacttatatacagagagggggtcaatgctcagcacagccatatttgtctatgctgctacatcgccagtgaacgggtactttggaggaagtctgtatgctagacaaggaggaaggagatggataaagcagatgtttatcggggcattccttatcccagctatggtgtgtggcactgcattcttcatcaactttatagccatttattaccatgcctctagagccattccttttggaacaatggtggccgtttgttgcatctgtttctttgttatccttcctctaaatctcgttggtacaatactgggtcgaaatctgtcgggtcagcccaacttcccttgtcgtgtcaatgccgtgcctcgtcccatcccggagaaaaaatggtttatggagcctgcagttattgtttgcctgggaggaattttaccttttggatcaatctttattgaaatgtacttcatcttcacgtccttctgggcatataagatctactatgtctatggcttcatgatgctggtgctggtcatcctgtgcattgtgactgtctgtgtgaccattgtctgcacatacttcctgctaaacgcagaggattacaggtggcagtggacgagtttcctgtctgcggcgtcgaccgcgatctacgtttacatgtactccttttactactacttcttcaaaaccaagatgtatggcttatttcaaacatcattttactttggctacatggcggtgtttagcacagccttggggataatgtgtggagcaatcggttacatgggaacaagtgcctttgttcgaaaaatctatactaatgtgaaaattgactagatatctgagacaacatggaacttcggatcagtttctctttcatgagggtggaacttgcacagaaaagaagaataatcgcaagaagagatttgggcttaacactgggtactttgtgggtctcttttgtggatggcttcaagtaacatctatttccattgatcctaggttcttactgactgctttctccagctgttcacagcagatgcttggattttatgcagtaggctttactacagtacatggctaatcttccccaaactagctcattaaagatgaaatagaccagctctcttcagtgaagaggacaaatagtttatttaaagcatttgttccaataaaataactagagggaaacttggatgctaaaattccataagtagaaaaatcttcctggcacttggtgtttctatgttattgaaaaatgatgttccagaaagattactttttcttttatttttactgccattgttgatgtgttgtgggacatttttatatattgaacctgggttcttttttgatctgttttggtcgtccctccattcaactgcatctttttttttttttaaaaacaaaattaaaagctattcaattctgcatggaatatatctgctgtcatcttaatcttagtttggatcaacctcatttatttatcttaaaattaaccagctttctcagttccatccaaagaagatacagtatgaaagtagaggtgcactctctataatacaatctactgtacagttagcaagcgaagtgttaaatggagaagatgcttgtttttattaaacatttggagatttagataatttacattttaactgaatgtctaaagtgattatcttcccctccctcccccaagttaatcttccatctttgtttttgggtttcaatgaaggctttacataagaaattattaaacaaaacaaggggggcaataaatgtatataacattaataatgtcgcgtaggtgtaggttcctggatgcatttggatgtacagactgactgggggactgtattgcgatgatgattggtgtagaaacgtatgggtctgggtggccttttacatcttgcctaccattgcatgaaacattggggtttcttcaaaatgtgtgtgtcatacttcttttgggagggggttgttttcttcttttatgaaactcctactggagctcaatttgtaatttagaaacatttaattttgttaatcctgtctgggacatttaggtaacatctaaagcattattgctttagaatgttcaaataaaatttcctgaccaaaaaaaaaaaaaaaaaaa

SEQ ID NO: 286 - DNA, 2303 bp, Mus musculus
tcatgtttcttggcgctctctggttgctgctgctcctgccgctgcgccccccgggagcgcagggccaggaggccgacgagcccaccccttggccgagcgtcaaaggcctgaaggagcagctgaggacggccggtgccctctccaaacggtactgggagcttttcagctgcaccttgtggcccgatcactgtgaagaccaggagacccccgtgccgcctctgggctggagccttcctctgtggggccggcggtcgctggatgtgctcactgcatggctctgccactttcaggactgctgcagcggcggcggcgattgcaggatctccaacaacttgacaggcttagaatcagacttgtgtgtacgactgcacggccagcatctcgctagcaagctggtcctaagagcagtgaagggctacttagagatgccccaagtaggcaaggccctggctctgtcattccacggctggtctggcacaggcaagaacttcgtggcacggatactgatggacaacctgtatcgggacggcatgaggagtgactgtgtcaagatgtttatttctaccttccactttccacaccccaagtatgtggacacgtacaaggaagagttgcagaggcagatgcaggagacgcagtggcgctgccaccagagcacgttcgtctttgacgaagcggagaagctgcacccggggctgctggagctgcttgaaccctacctggaaccgaggagccctgaggcccgtggagttgaggcgccccgagccatcttcctttttctcagcaacctcggaggcagtgtcatcaatgaggtagtcctgagtttgcttaaggctggatggtccagggaggaaattacgacgcagcacttggaggtgccccttcaggctgagatcatggaggctgcagacagcagctttggctccagcggtctcctgaagaaacaccttattgaccactttatccccttcctgccactggagtaccgccatgtgaggctgtgcgtccgagatgccttcctgggccaggatctcccatacacagaagagaccctggatgaaatcgccaagatgatgacatatgtccctgaggaagagcggcttttctcctctcagggctgcaaatccatttcccagagaatcaacctcttcctgccttgaaagtgactcctgtgcaccctaaacaatcctccacaagagacagccatctgccaggtgccctggcgtccagcaatcactgctttcagctggtgtgcaagaggcagttcctaacaaccacttggtgccttaaaaaacctacattctagacaatctagactgagggtcaggaagccagtggaacggaaggtccaagtaccaaaggatcctcagaacactccctacagtctcctggcaccgtagctcttcctggaaggcagctggagttcatatgagcctgaggctctaggatctttgggctacagaacaaggaatatgtgtggactagaggcgtgtggtccaggtctgcaggtctggctggctttccttgctttccggcaacgtggggagaggggcagcttctgcatgtgagaccagcaagggccttaggctaaaggacaaaccgaagctttcaaaacaggatgggtgtggcctagcactgtagtaggctaatatgggagaagagagctaaagaaacctgagctgcctcgtttgagcagcctgccaggcttgaccaaaacacaggtgtatggatagctaaggcatgttctgttgtgcagactgaaaactttttaaagaggcctcgtcatgtgcaattaaatcttgtatttttctaacatcctttcttactgagacctggtccttgcactgccctggcaggctggcacaagcacgtgctgtctgtcctacgtgctggtctcaggctactttagagcttcttactaaactcctctgactcagccctcgaacacacgtgttctccgctccagctctgacaagtggttcctgaggctgatgtggcgaggcaggtcagtaccacctgtctttagaataccatgggccattcttttctggtcccttcacactttttaaacatacaggtctttgtgttttctcagaatttacccctcttattcaaagtcctgctcagcactctcacctttagttcttgtaaaaatggaccatttctgcaacccccacttaccagtacatgtgtactcactcacctgccttaaggctagggaccacctagcccagccatattcaaataactgaaataaaggagtgtgagtgaggtggtagaggactggccttcagcaggctcag

SEQ ID NO: 287 - DNA, 2971 bp, Mus musculus
ggccggctctccgcttagagaaggtgtagccggtctacgctgagaggcagtggtggtggccgcggaggttcggggcgcggcgtagcgtgcggggcggaggccctgaccgattcacaatgacttcctttcaagaagtccaattgcagacttccaattttgcccatgtcatctttcaaaatgtggctaaaagttaccttcctaatgcacacttggagtgccattacaccttaactccgtatatccatccacactccaaagattgggttggtatattcaaggttggatggagtactgctcgtgactattacacatttttatggtctcctatgcctgaacattatgtggaaggatcaacagtcaattgtgtactagcatttcaaggatattaccttccaaatgatgatggagaattttatcagttctgttacgtcacccataagggtgaaattcgtggagcaagtactcctttccagttccgagctgcttctccagttgaagagctgctcactatggaagatgaaggcaattccgatatgttggtggtaaccacaaaagctggccttcttgagctgaaaattgagaagaccctgaaagaaaaagaagaattgttaaagttgatagctgttcttgaaaaagaaacagcacagctgagagaacaagttggaagaatggagagagaactgagccaggagaaagggcggtgtgagcaattgcaggctgagcagaagggccttcttgaagtatcacaaagtttgagagtggaaaacgaagagtttatgaagagatacagtgatgctacagctaaagttcaacagcttgaagaggacattgtatcagtgacacataaagccattgaaaaagaaactgacctagacagtttgaaggataagctcaggaaggcacagcatgagagagagcagcttgaatgtcagctgcagacagaaaaggatgagaaggagctgtataaggtacatttgaagaatacagaaatagaaaatacgaagcttgtgtcagagatacagactttaaagaatttagatggaaacaaagaaagcatgattacccatttcaaagaagagattagcaaactgcagtccagcttggctgacaaggaaaatttgtacagagctctcctgcttacaacctcaaataaagaagatacattatttttaaaggagcaacttcgcaaagcggaggaacaagtccaggcaacacggccagaacttatctttctgactaaagagctcagtgatgcagtgaatgtgcgagataaaactatggcagatctgcatactgcacgcttagaaaatgagagagtgaagaagcagctagccgacacactggcagagctgcagctacatgctgtaaagaaagatcaggaaaagactgataccctggaacatgaactgagaagagaagttgaagatctgaaactccgtcttcagatggctgcagatcattacagagaaaagtttaaggagtgccagaggctccaaaagcaaataaacaaactttcagaccaggcagcgagtactaacagtgtcttcacaaagaaaatggggagtcagcagaaagtgaacgatgcttcaataaatacagacccggctgcctctacttctgcttctgccgtggatgtaaagccagcagcgtcatgtgcagagacaggctttgatatgtcaacaaaggatcatgtctgtgaaatgactaaagaaattgctgagaaaatagaaaagtataataagtgtaaacaactcttgcaggatgagaaaactaagtgcaataaatacgctgaagaacttgccaaaatggagctgaagtggaaagaacaagtgaaaattgctgaaaatgtaaaacttgaactagctgaagtagaggataactacaaagttcagctggcggagaaagagaaagaaataaatggtctggcttcatatttggaaaatctctccagggagaaggaacttacaaagagtttagaagatcaaaaaggaaggaaattggaaggccagagccctcaacaagtctcaaggtgtctcaacacatgttctgagcaaaatgggctccttcctccactgtcaagtgcacagacagttcttcagtatggcaacccttactcagcacaggaaacaagagatggagcagatggtgctttttatccagatgaaatccaaaggccacctgtgcgagtcccatcttgggaagacaatgttgtctgtagccagcctgctcgaaaccttagccggccggatggtttagaggaccccgaagacagcagagaagacgaaaatgtgcccattcctcctgatccagcaaaccagcacttacgtagtcatggagcaggcttttgctttgattccagctttgatgttcacaagaaatgtcccctctgtgaattaatgttccctcctaactacgatcagaccaaatttgaagaacacgttgaaagtcactggaaggtgtgtccaatgtgcagcgagcagttcccgccggactacgaccagcaggggtttgaaaggcatgttcagacccattttgatcagaatgttctcaacttcgactagcttgtaataagaggtagtacaatttagcaattacaaaacaaaccacatctcagaggctaaggagatgccaggtgtcactttcaggttcctcctccacactttcctgatgatggagaacttctttagcgtgtgctgtcactagggccagggtacagctgtgactacatacaatgaatacagttttaatctctgttaatcttgtctgctgtaagaagagtgcttctgggtttgcatctctgtctatcctccagttagcagaagtgtgtgaagaacacaagaattattttaatgttaccgaattgcaaacataaacatgtagtagttagatcctcagcacaatcacacttacaagtttctgtacaccttggcgattgagcatgaccactgatatgtaataaaaagcattgatc

SEQ ID NO: 288 - DNA, 2886 bp, Mus musculus
gagtcttcagctcggccatggctcccaaaggcggctccaagcagcagtccgaggaggacctgctccttcaggatttcagccgcaacctgtcggccaaatcgtcggcgctgttcttcgggaacgcgttcatcgtgtctgccatccccatctggttgtattggagaatatggcatatggatctcatccagtctgctgtgctctacagtgtgatgaccttagtaagcacttacttagtagccttcgcgtacaagaatgtaaaatttgttctgaagcacaaagtggcacagaagagggaggatgctgtttccaaagaagtgactcgaaagctttctgaagctgataataggaagatgtcccggaaggagaaagacgaaagaatcctgtggaagaagaatgaagttgctgattatgaagctacaacattctccatcttctataacaacactctgttcctggttctggttattgttgcttccttctttatactgaagaacttcaaccccacagtaaactacattttgtccataagtgcttcatctggactcatcgccctcttgtctactggctccaaatagaccatgtagcttggccctctgcctttgtatctcggggtggcctgtggtatatgggaaagcatcagggtggccaggttgggagacacataagttgtttttatagtctggagcttcagggtttaaaaatgcagtagaatgtaattcagtgtttgtttattggctgtttttgacagattgctgaaattaaatgaattgaaagggaaactcagagtaccagggcattttattaaaaggcaaggagtcttgcaatgtgctgtaatcacgaggagaaaataacttgtttcctacatctgtcagaggtcatggtaacctggactgagctgttattatttataataggaggaagaagttaataactggttctctgtgttccaagcacaatattacaacttttcgaactgtaaatcttagagtgaatcctcttcctaaggaattaaacagaagcctcattttctttttaacaaggcttcaaatttgtaatttataataactcaaagttaattgtaaattacagggcctctccaatttgagggagggaaacttgcagaatctttttttttttttttttaaaagaaaggcagccaaggtagttacctaaaaatagtacccaggcctatgagtgttggcctgtgaggccaaagcacacactgttcagctgtatggctttggccctgggtggccgggaggtcagcttgaccctgccatgttggtttgatgtgcgaagtcactgggatcattgtgtctatgaccaggctttcgcaccacaggcagaatattaagtgagagagtatttctactgtgattattgacacatgagagaccaaaagaatttttgtgaacgtaaccctggaattctttgggctctccaaagaatttacagtggtttaaaatggttgtcagcatttttccatgaggactttaataaacttagccccgtttgctcaaggttccttttaattgtgaagtgctgatcacatacatttttgggggggtctagcaaagagtagcctcatgttgtgtggtcataacccccacccccccatgtcttttccccactcattatgtacagattctgattttgtatgcaatgacttcacagtttgcaaagtgcagcactatgatcactgatttcatattcctatttgccgttcaccacacccaagaactttctgtaaagggaaatattactaatatctagtttctgcttgtaaacttaagaggaacatatgactctatttttaactttaaagatatttacaaggagtagagctgtttctgtgctggtagatgtttctgtggtctgtgctacttagggaactcaagaggagtgcacttgtatagtcatgttactccttactgtctgcctggagaatcattttatctccaagtgttcagttcttttcagtgatacattgttacctgagtgtcatttccaggtaatgtggaatgaatggggaaatgagaagggattcaaagcaaagtacatttcagtaacacatatgaggtaggctgttttgttgttttattttaatcagtatttggctggtaaaatgataatttgataaaccatcatgttaccaaagctaaaccaaactccttctaagtgactgctgtgaacttgccactaggtggcggtgcctgtgtagctggggagaaagtcaccacctttatctttatctgacagtatggtcagaagctcaagaaatcgggatgtcagcctcaaatttttaattttaagtagtaaccaaaagtttgttgggagagtgattatgcagttttcttctgtcttgactgtttcctgcgactgtctttgtttttaactctgaacatgttctctaactctgtgctaccacatttctgtgtgtgaagtcatgcagccagtgtatcagccctttgtacttagaagtgtggcccctcctctctagcctcttctccaccattgaacattgcacataggattacgaagtgttcagtaagacagtgaaatctgtggcaggcagagtttgtaccataaaaagaccccatacatcacaccagtaaaataggacattcagagtgctcacattctttcctttctcatatgtgtgataggtagactcttagtgttaagaatttttatttcacgatttactcatttataacttaatagaagtcttggattaaatatacaacttgtactgtttgatatattgttttaatttggaaaggataatttgaagttaactgaaatgatggaagtggaatttatactttgcattttaaaaaaagtcttgttattaataagtatgattaaactttgtttttaaaaatg

SEQ ID NO: 289 - DNA, 1463 bp, Mus musculus
gtgaataagaagccccggtgtggggagtttaggaaaatgcctaatttgaatctctaaaagaacctgaggactgtttaacaatcgatcacttacaggctcccatggtcgcctaactaacactcgtctttgtgggataataggcttgtagcagtggcctttcgcggcgggtttcgcgtcaggcagtgcagtggacgtccccggcacaggggtcctcagacccctgaagattgacggcagaccgcagggatggcggcagggcagggtgggtggctgcggcccgctctggggctgcgcttgctgctggcgactgcgtttcaagcggcgtctgctctgggggcagagtttgcgtcagaggcatgcagagagttgggtttctccagcaacttgctctgcagctcttgcgatcttcttggacagtttaatctgctcccactggatcctgtttgcagagggtgctgtcaggaagaagcacaatttgaaaccaaaaagctgtatgcaggagccatccttgaagtctgcggatgaaaattggggaggttccctcaagtccaagcttttgtcagaagtgataaacccaaactcttcagaggtctacagatcaagtatgttcgaggctcagaccctgtactaaagcttttggacgacaacgggaacattgctgaagaactaagcatcctcaagtggaacacagacagtgtggaagagttcctgagcgagaagttggaacgcatataaacatgcttagtagtttttatactaatcaaatgaattatcacagcacctagacaataacttagttttgcatgcttacattggtcatcctttttatgtacatcattaatcttctgacaagaagctgaagtagcaccacagtccataatatatcaggatctggcaagcttaaggaacccagctcttaaaaatttctcttcttctacacttgttgctctcaccagtgaaacgctttgtaaggaggcatctgggtaattatgcaaataagtttgtgataattgctccagttctacaaacaacagaattttaaatagaggaagtggataaaggagacacctcccttgctgtgtgctctttgaaagtaattgacagaaaactacaaacacgtaggatgccctgcgcctcagcagcacccaccccagagcctcttggcatgcccagctttcttttcagtacaagtatttgtagtttgtaatgaatgtgccacatacaggttttgtagcttattattatggaacagactgaagatctgcagtacgaatttaatacttataaaggtttgcattaatgaggattacacagaaaacctttgttaaggacttgtgtagatctgataattggcaaatttttattttaaaagtattcttacagaagagttccatttaagaatgttcacttataggaccaaaatataaataaaaactttcaaatatgtttgattttaaaaaaaa

SEQ ID NO: 290 - DNA, 1963 bp, Mus musculus
gttttcgcggactctaagatttcagaatgactaccatcttgacttccacttttagaaacttgtcaactacatcaaaatgggctctcagatcttctataagacctctgagctgttcttcccaactgcactctgccccagctgtccagaccaagtcaaagaagactttagcaaaacccaatatgaagaatattgtggtggtggaaggggtccgcattccatttctgctgtcaggcacttcgtataaagacctaatgccacatgacttggctagagctgcactttcgggtttgttgcatcggaccaatattccaaaggatgttgttgattatatcatctttggtacagttattcaggaagtgaaaacaagcaatgtggctagagaggctgccctgggagctggcttctctgataagactccagctcacactgtcaccatggcttgtatctcttcaaaccaagccatgaccacagctgttggtctgatagcttctggccagtgtgatgtcgtcgtggctggtggtgttgagttaatgtctgatgtccctattcgtcattcaagaaatatgaggaaaatgatgcttgatctcaataaagccaagactctgggccagcgcctgtccttactcagtaaattcagattgaattttctgtcccctgagctccctgcagtggctgagttctccactaatgagaccatgggccactctgcagaccgactggctgctgcctttgctgtttctcgaatggaacaggatgaatatgcactgcgttctcatagtctggccaagaaggcacaggatgaaggacacctttctgatattgtacccttcaaagtaccaggaaaggacacagttaccaaagataatgggatccgtccttcctcactggagcaaatggccaaactaaaacctgcgttcatcaaaccctatggcacagtgacagctgcaaattcttctttcctgactgatggcgcttctgcgatgctaatcatgtcagaggacagagctctggccatgggttataaaccaaaggcatatttgagggattttatatatgtgtcccaggatccgaaagatcagcttttactcggaccaacatatgctactccaaaagttttagaaaaggcagggttaaccatgaatgatatcgatgcttttgaatttcatgaagccttctcaggccagattttagctaactttaaagccatggattctgattggtttgcacaaaactacatgggtaggaaaaccaaggttggatcacctcctctggagaagtttaatatctggggcggatcactgtctctggggcacccttttggagccactggctgtcggctggtcatggcagctgccaacagactgaggaaggatggaggccagtatgctttagtggctgcctgtgcagctggaggacagggtcatgctatgattgtggaagcttaccccaaatgactgctctagaaggaggcgaccgactgatctcttcagcacttgcactgggcaatgccatttcaatgcactaccaagtgatacctgcagttcctagctcttcttaggaaacaacatttgtggccttctcttaaatactttgcaatccagccttgccagtgttcgaggttttcgataatcacagcttctgctctctaagttccagactattacagatgtttgcgcagttcctgttatttcttttcacagagactaatggctgctagccacttggagagagagaggctagctcaggtttagaatcgtctttgtaacatttgcagatactccttattcctgtctgtgtcatagagataattatttttttctaaaatacaaaccggtgtgcctaagttaacttactatagaaaaaaaaataatctaaacatctcttaaacctgaaatgcttagagacatagataccatgttggttgaccttaataaagtagacatgtattaaaaaaaaaaaaaaa

SEQ ID NO: 291 - DNA, 2674 bp, Mus musculus
gatgcggcgttcggaggcgaggtcggagcctgtgcggccggggtcagggaaccggagccgggccgccgcgctgtggagaagctgcgtcggggcgcacaggttattagaaatggctactccacagtcagttttcgtctttgcaatctgcattttaatgataacagaattaatcctggcctccaaaagctactatgatatcttaggtgtgccaaagtctgcctcagagcgacaaatcaaaaaggcctttcacaaattagccatgaagtaccaccctgacaaaaataaaagccctgatgctgaagcaaaattcagagagattgcagaagcgtatgaaacactctcggatgccaatagtcggaaagagtatgacacaattggacacagtgcttttaccaatggcaaaggacaaagaggcaatgggagtccttttgaacagtcatttaacttcaattttgatgacttatttaaagactttaatttttttggtcagaaccaaaacactcggtctaagaagcattttgaaaaccacttccacacacgccaggatggttctagtagacaaaggcatcacttccaggagttttcttttggaggcggattgtttgatgatatgtttgaagacatggagaaaatgttttcttttagtggctttgataccaccaatcgacacacagtacagactgaaaatagatttcatggatctagcaagcactgcaggactgtcactcaacgaagaggaaatatggttactacatacactgattgttcaggacaatagttgaatcttttcctgtctccactaagcccacctagtttattcttccttactatgtctgatgaaaaaagtttcctgtgaactattttgggtaaatgcatgatttcacttatgttaagctgtttgttataggtattccatatattgaactttttgttttttaaaacaaattaaaatacattcagctagtagacgactgtaattttcctgagtaggaggagttgtggtgggagatcagtggcgggagttgtgtaggttgcctgtcgtttggctcagtttcacaccccccccacccccccggccatattcccaaaccaaactcagcccgacacatacttaacaattaagttttaaaagttaccatagatttacattgtgtgaacttgaataataattgcagtgaaacctctgcaaattcaaaactgcacgccctgtggccctgacttgggttactaaatgtctgaagctgtaattttgagtcatttagtgaagaagaccattgcttttggctgtttgcccctgaaagctttagaaagtgaaggtttttatataaatgaattgaaatcaagttttattatgaaataggttttagaagaaaaacccttacacgaaattaggaagagtttagaagatggttccctttaaagagagaagtgaaaacccacccccagtcgtccaggaagtcagccgggctgcgtcaggaagctgctctcagttctgaccaaggaaggcatggctaccgggcaactgacagaacagaatgcatctaacaacaagaactttaccctgagaaatgaactgctcacggcctcagaccacggcattgcccacgcagtagaccaaaaataagatgcaaatatcattgctgctgaagaaagcgtcatttttatccacagagtggcatgtcaccctcaggagagcaccagtggccaaaggcacaaggaaacactagaagagtccagtggtcagtcactgtctgaagccttagcaaggcgatataagtacacttggaagtaggcatcaaagataaaggtgtagagactgggaggctacagggagggaagcctgtagctcttccatagaatgcttggagtaaaaagctcaactctgaagtcaaatacagtctactttaaaaaaatatctccgagcctggtggtggtgctacaccctttaatcccagcactcgggaggcagaggcaggtggaatctctgagttcaaggccagcctggtctacacgtgaattccaggacagccagggctttccagtcttgaaaaagaataacaaaaccaaaaacaaacaaaaatacagtgaaaatggacttaaattcatttactgggagactgggggtggacacatgccatgcttgcatgtggaagtcagtgctctctccactgtgtgggtcccgaggatggaactgaggtcatccgtctgaggtcatccgtctgaggtcatccgtctgaggtcatccgtctgaggtcatccgtctgaggtcatccgtcaggcttgtgagcatgggcctccttcatgaaggtgcctcagccccaccctctccattgagagcatggcttcttgatcttagacgccttaaaatggcaagtcttagagtcagtcaaagcatctcataatactcaaagtctctgttctgtgagaaacaagtatctaggttggaacttcttggcctttgacaacttgcagacttttcccaagcagctgctggtccaccatgcgaatgtgcggctcgtcgacaaaggacacatacttcaacgtcggcttgggttccatgatggactcacacttctttctgtagtaatactcgttcactgtgcagggctcacagcacttacagtaggggtaaacccccgacctgcagaaagcactggagtatgtgttgatgagc

SEQ ID NO: 292 - DNA, 2379 bp, Mus musculus
cggacgctttgcacgcgtagcagatgatcctcggtgcagtcggttctgtgctgacctcgctcctccgcattcaccgggctgcagcagtcgccgccatgagtactggcaccttcgtcgtgtcgcagccgctcaactaccgcggcggggcccgtgtggagccggtggatgcttccggcacggagaaagcgttcgagccagccaccggccgagtgattgccactttcgcgtgttcaggagaaaaggaagtaaacttggccgttgagaatgcaaaggctgcctttaaactctggagtaagaaaagtggcctggagcgctgccaagtcctcctagaggctgcccggatcatcaaggagcggaaggatgaaattgccaccgtggagaccatcaacaacgggaagtccatatttgaggcccgcctggatgttgacacttgctggcagtgcctggaatactatgcagggctggctgcatccatggcaggcgagcacattcagctcccaggagggtccttcggctacacccgaagagagccgcttggggtgtgtgtggggataggagcatggaactatcccttccagatcgcctgttggaagtctgctccggctctggcttgtggtaatgccatgatctttaagccttctcccttcacgcctgtgtctgctctgctcctggctgagatctacaccaaagcgggtgcgcctccggggctcttcaacgtggtgcaaggtggggctgccacaggccagtttctgtgtcatcatcgcgaggtggccaaaatctccttcaccggaagtgtgcccactggcgtgaagatcatggagatgtccgctaagggagtcaagcccattactttggaacttgggggcaaatctcctctcatcatcttctcagactgtaatatggagaatgctgtgaagggggccctgatggccaacttcctcacacaaggacaggtctgctgcaatgggactagagtctttgtgcaaaaggaaattgctgataaattcataaatgaggttgtgaagcagactcagaagataaaacttggagacccccttctggaagatacgaggatgggcccactcatcaacgccccacatctggaacgagtcctcgggtttgtcaagttggcaaaggagcagggtgctactgtgctgtgtggtggagaggtgtatgtaccagaggaccccaaattaaaacatggatattacatgacaccttgcattttaactaattgcagagacgacatgacttgtgtaaaagaagagatctttggaccagtcatgtccattttaacatttggaactgaagccgaggttctagagcgagctaatgacaccacttttggactagcagctggggtcttcaccagggacatccagagggcacaccgggtggcggctgagctgcaggctggaacgtgctacattaacaactataatgtcagcccagtggagctgccctttggtggctacaagaagtcaggatttggcagagagaatggccgtgtgacgattgagtactactctcagctgaagacggtgtgtgtggagatgggcgacgtggagtcagccttttgaaacccagggaagcctgctggcgtagccaagctgtggaatgagttgactgccttgacaggcagcataactgaatagcttcttacatccaggctttgggtcattagtgtgataacgggtcagtgttgtcctctgtcttacagtcaccttcccagtttgaaaatgtgcacaagtgcctttcagatggtagccaggtaacctgttgtcccagcccctgagaaatatgtagaccccagaagcgcactcttcagacataggcaggccacagctctgctcctacacatttgtcccaccaacaatggcagctttctagtttgctttaaagcaggccttccttcctgggttcctggtgaatcagtacatatacattctttgttcattgacaactaaaaaacaaattcttaaagcttttatttggagctgggcagtactggtatgtgcctttaatcccggcacttgggaggcagagacaggtggatgtctgagtttagagccagcctggtctacagagtgaattccagtctaggaaggtctacatagagaaatcctgtctcaaacaaaacaaaacaaaaaaaaacccataaataaataaaaaaatgtaaaaagctgttattcttagtatttgtgggctatgtgactcattggcatttaaacagctgtgttctaactaactagcaagacagctcagtgggtaaggtcttatcacttaaacccagtgacttcaggtttatctctagaacccaccccttccccatatcatacactgcacaataataaaatctttctcaaaaaaaaaaaaaaa

SEQ ID NO: 293 - DNA, 1877 bp, Mus musculus
gactgccagcgcctctgtgtgagctctggccttccctgctgcacacttccccggtcccagaggaatcagacgatgtccacagacatggagactgcagtcgtcggcaaggtggaccctgaggctccacaacccacccacattgatgtgcacatccaccaggagtctgctctggccaaacttctgctggccggatgctcattgctaaggattccagcatccgcttccacccagagccagggcagcagcagagtgctggtggcctcctgggtggtgcagactgtgctgggggctctgagtgtggttctgggtggaaccctctacataggccattatttagccatgtattccgaaggcgcccccttctggactgggatcgtggctatgctggctggagctgttgccttccttcacaagaaacggggtggtacctgctgggccctgatgaggacccttcttgtgctggcaagtttctgcaccgctgtggctgccatcgttattgggtctcgtgagttgaatttttactggtattttctcggagatgatgtctgtcaaagagactcttcatatggatggtccaccatgcctagaaccactccagttcccgaagaagctgataggattgccttgtgcatatactacacaagcatgctaaagaccctgctcatgagcctccaagctatgctcttgggtatctgggtgctgctgctcctggcttctctcacccatgtatgtgtctacatctggaaaagatttttcacaaaggcggaaacagaggagaagaaactgctgggtgcagctgtgatctagcctttcctcttgctccgggcgtccctcctactgaagcctgaaagaagaatcaggcaggactaagaagaccctcccccactagcagggccatggccactgcctggttctgcccagcaccacagcagctctcagcagcacttgcttgtctctccatccttcaccgtcctatatccctcctcaggcagcaacttgataataaactctcctgttattgctggcaggtccttgctttgtcacaccagggaattcacactgtctgggaggcagagcagcgtgaggacagcaagcctctgatgcttcccatagctcctacatcctacccagctctagaatcttgcaacctgcaaacagatgaccgggtgttcaggattgtgctattcaagactcccagagtgggaaagcaggcattctctcaaaatccctttgcttgcataagctaggcagtcacatactgcagaattttgtgcctgtgcatccaaacccacccagtcaacaaaaaagtattctagcagccaaaatctgagaagacaatcaaagccctccatgatgaacagggtggtgtggagaagtggagaagacaaccatgggcaaagaaggctttatacttgagaatgatgttgatgccaagaagccaaagatgcattagagtgaacagttgccaaatagacaaagttaaatttcaaaaccaaaaggctacttcgacctcttcacctctgcttcccatctcagaatctaaatgtggtcactaaatatgaaaattaaccagctcgcttaccagcaccacttgcaaactctaccacccccacagcaccaccacaacgggggaggaaagaagagaaccaaaatttccaagatcctgcttttttgtttttcttaaagttactttcaaaggggaaattggtatttctcatttctgtcttgcatgcttgtacagattgcctgcataatgcaggcgacctaaccagacttcaggatgttctctggtttcctgtcctacatctttgctgtccttgcctgcagtgtgaccatgtttgttaaactctcaaagaagaaaaataaaatcttacttg

SEQ ID NO: 294 - DNA, 1380 bp, Mus musculus
gccgggaagcgcgagcccccgcagtccaggactaagctgtcagctctcgtgctcgcatctcgcgagcgttcgggtctctggtagaggaggcggcggcggtggcggcggcggtggttcccgcgcgctccgggtctctgaggctgagggtactgcggggctgactagaacagagacaatgtttcgagcagcggcgcctgggcagctccggcgggcggcctcattgctccgttttcagagtaccttggtaatagctgagcatgcaaatgattccctagcacccattactctaaatactatcactgcagctggacgtcttggaggtgaagtgtcctgcttagtagctggaaccaagtgtgacaaggtggtacaggatctatgtaaagtagctggcgtagcaaaggttctggtggctcagcatgatgcatacaaaggccttcttccagaggaactcacaccattgattttggaaactcagaagcagttcagttacacacacatctgtgctggagcgtctgcttttggaaagaaccttctgcccagagtagctgccaaacttaatgttgctccagtttctgacatcattgagatcaagtcacctgacacatttgtgagaactatctatgcaggaaatgcgttgtgtacagtaaagtgtgatgagaaagtaaaggtgttttctgttcgaggaacatcttttgaggctgcagcaacaagtggaggtagtgctagttcagaaaaggcaccaagttcttcatcagtgggaatatcagagtggcttgaccagaaattgacaaaaagtgacccaccagaactaactggtgccaaagtggtggtatctggtggtcggggtttgaagagtggagagaactttaaactgctgtatgacctggcagatcaactacatgctgcagttggtgcttcccgagctgctgttgatgctggctttgttcccaatgacatgcaagttggtcagacaggaaaaatagtagctccagaactttatattgctgtaggaatatctggagccattcaacatttagctgggatgaaggacagcaagacaatcgtggctattaacaaagatccagaagctccaattttccaggtggcagattatggaatagttgcagatttatttaaggtggttcctgaaatgacagaaatactgaagaaaaaataagtcaaaatcatatcttaaggaaactgttgaaagtattcagctgaaatcatagaaattcataatctgaagaaagaaattatgctaacagcagctagaatgccttttgatgaatcaattattatattcctttttaattttttgtggtttcaaacaattattttttgacattttctaattctgaaataaaaaacataataaagtcc

SEQ ID NO: 295 - DNA, 1306 bp, Mus musculus
tttttaaaagtggagcctcaggccagcccctagccgcagcgtgtctcagtcggttgtcgagtcccttctgtcccagtcgttcgtgcctcttgtcccacgcaactccagcttgtaccatgccggtcaaaggaggtagcaagtgcatcaaatacctgctcttcggatttaacttcatcttctggctcgctggcattgcagtgcttgctattggactatggctccgattcgactctcagaccaagagcatcttcgagcaagagaataaccattccagtttctacacaggagtgtacattctgattggagccggggccctcatgatgctggttggtttcctgggctgctgtggagctgtacaagagtcccagtgcatgctgggattgttcttcgggttcctcttggtgatattcgccattgagatagccgccgccgtctggggctatacccacaaggatgaggtgattaaagaactccaggagttttacaaggacacctaccaaaagttacggagcaaggatgaaccccagcgggaaacactcaaagccatccatatggcgttggactgctgtggcatagctggtcctttggagcagtttatctcggacacctgccccaagaaacagcttttggaaagtttccaggttaagccctgccctgaagccatcagtgaggtcttcaacaacaagttccacatcattggagcagtgggtatcggcatcgccgtggtgatgatcttcggcatgatcttcagcatgatcctgtgctgcgccatccgcaggagccgagaaatggtctagagtctgcccaaccccgagcaggaacaacggccctgaagactgtccgggccatttgggttttttttgccactaatattagtattcattatgcatttctaaataacagtcattctgtttgtctttttaatgctttattcattattgacatttgtagttgagggatccgggggttcaatttattttgatttttttttttggttgtttatttttgcttgttatgttaagcaaaaatcctgcaatgaaaggtactatatttgccagactctagacataagatattgtacataaagagaattttttttgcctttaaatagataaaagtatctatcagataaaaatcaggttgtaagttatattgaagacaatttgatacataataaaagattataacagtgaaaaaaaaaaaaaaaaaaaaaaaaaaaaaaaaaaaaaaaaaaaaaaaaaaaaaaaaaaaaaaaaaaaaaaaaaaaaaaaaaaaaaaaaaaaaaaaaaaaaaaaaaaaaaaaaaa

SEQ ID NO: 296 - DNA, 1984 bp, Mus musculus
tactccactttatcatgctgtcattttccttaatcccttgggctttggcagagtccagtggtatttattggctccctctaagtaggcttcagagagatgggggaaggacagaaatccaatcctttagcctacttgcgagccctcctttctggtctgagcctagagggccacgccagaatggtagcacgccccttcccgcaggacgccccgacaggcccaacaatagagcacgaatacgtcacgtgggcctcgcacgcccgacagcccaacaatagagcacgaatacgtcacgtgggcctcgcagtgacaaagacaacgtggcgaaagacagcgccaaaaatctccgtgcccgctgtctgccaccaactccgtcttgtttcacccttctcccttgcggagctcgtctgggagacggtgaattaccgagttaccctcaattcctacagcccccgacagcgagcccagccacgcgcaccgcggtcaaacagcgccggagagagttgaacttttgattgggcgtctgtatgtggcagaaggcggagggagagattccgagccgacgtcccgcgagagccgccgggcccagagcgcaggccgacaggagttggcaagggccgggccgagggcgggccagaagacgcgtcctttggctgtggacaccgtcgtagagtcgtctgggttgaaccgctgggccgaaagcttttgtcaggggcctgggcgagaacgaggcccgcgaggttccggatggtgtccatgactttcaaacggagccgcagtgaccggttctacagcacccggtgctgcggctgtttccatgtccgcaccgggacgatcatcctggggacctggtacatggtggtcaacctgttgatggccattttgctgaccgtggaggtgactcatccaaattccatgccagctgtcaacattcagtatgaagtcattggtaattactattcatctgagagaatggctgataatgcctgcgttctttttgccgtctctgttcttatgtttataatcagttcaatgctggtttatggagccatttcttatcaagtgggctggctgattcctttcttctgctaccgactctttgacttcgttctcagttgtctggtggccatcagttctctcacttacttgccaagaatcaaagaatatctggatcagttgcctgatttcccatacaaagatgacctcctggcattggactccagctgcctcctgttcatcgtccttgtgttctttgtggtattcatcatttttaaggcttacctaatcaattgtgtttggaactgctacaaatacatcaacaacagaaatgtgccagagattgccgtgtaccctgcctttgaaacacctccacagtatgttttgccaacctatgaaatggctgtgaagattcctgagaaagagccaccacctccttacctgcctgcctgaggacattctgccttgtcaataaagcctataccagcttctcgtcttgtttattttacaagaaagctgcagtgcgggcctctcagacttgtttgatagaaagtacactgtcttgtctgagcatttattttcaaacactaaggagcttttggacatttattaaaaactttttgttaagtatcacattttagagactttttgaagacaatctagattaagcaagagccaagtgccattgttagcctttagctgagggtatgggggggaggggtctccatgttttcttttttaactttgcactttctttgtataataatagtttatgttttggatgtttggtgccctgagtagtttccggggcgtgactacagtgttgaggatgaataggttgggtataacacctgcagtttccagctcgatgaaacaggagagagagagaaataccagtttgacttgactgtggaagatgatggttgcatgcttctcaattgtacgtttccatcttggtgataaacccccttaataaagctcataaatttta

SEQ ID NO: 297 - DNA, 2822 bp, Mus musculus
gcgcgctcctcagctggccaactccacccagtcctaagacccttttggtctgcagctgtcgtccttgtttgtgctacagtcgccactgcctggagagggcttctgatcagccttttccaggtgtgcaaccctagccgccttcgcagccggaactttctccttccggtcctctgttaagggagcagccatgccggtaacagtaactcgtacaaccatcacgactacaacgtcatcctccaccactgtggggtccgctcgggcgctgacccagccgctgggcctcctccgcctcctgcagctaatatccacctgtgtggctttctcgctggtggccagtgtgggtgcctggacagggcccatgggtaactgggccatgttcacctggtgtttctgctttgctgttaccctcatcatcctgattgtggagttaggtggactccaggcccacttccccctgtcatggcgaaacttccccatcacctttgcctgctacgcggccctcttctgcctgtcgtcttccatcatctatcccaccacctatgtgcagttcctagctcatggacgtacccgggaccatgccatcgctgccaccactttctcctgcgttgcctgtttggcgtatgccactgaagtggcctggacccgtgcaaggcccggtgagatcactggctatatggctaccgtgccagggctgctcaaagtttttgagaccttcgtagcctgtatcatctttgccttcatcggtgagccgctcctgtataatcagaagccagccctggagtggtgtgtggcagtctatgccatctgcttcatactagcaggggtgaccatcctgctcaacctgggggattgtaccaacgtgttgcccatccctttccccaccttcctctcaggcttggcttactctctgttctcttttacgccactgccatcgtcctctggcccctctaccaatttgatcagagatatcagggccaaccccgccgttcaatggatccaagctgcactcgtagtattagttatatacaacccaacacggtgtgtttctgggaccgacgactggcggtgtccatcctgacaggtatcaacctgctggcatatgtgtctgatctggtgtactccactcgtctggtgttcgtcaaggtctgagattgacaaggggctcccttccccatctctccttgcagcctcttcaaccagttgattacccaggtgattggtaccatcctgttttctcatctccctcccatttcctcttccctgttagatatgtatagtcttccttattccccgtttgccttttctatctctttcttacctttcctcttctggtatgcctgttttacccttgagctgtggctccacagtttgcctcgttcattttttttctatctctatagtctttcctgtgggttttatcacctgcttattttcttgggagccctaagaaatcttgctttctttccctcacccctcaaaggtgctggccccacacatcccacactcctttacagttacccacactcttttgcagttctttactccaagggtctctttaggggcctcattgccaaagcatgcctgcctgcctgcctgccttagctgtgccttagtctgtgtgtgtgtgtgtgtgtgtgtgtgtgtgtgtgtgtgtgtgtgtgtgttaaggggattgggaagcaggccatataatgtacctctcctttaaattcaaaacaaagcaaacaaaatcctggaggtcagcaattcccggtggccagaagtcagcattatgcagtctctgcctctacttgtcactcaacgttgcaccaaattggctctagattttttttaccaggcttactgaaagcccaccacctagaggatagataccctagatgaagcaatggatgggcaccttttcctaaacgattctctgtgctatttaaacaaacccaacaaaaatatccacatggtatctctctctgtgtctctgtccctccccccacccccagggtttctctgtgtagccttggctgtcctgaatttgctctgtagacgaggctgccctctaactcaagatatctgcctgcttatgcctccctggtgctgggcttaagggtgtgtgccatcactgccaggccacccatatggtcttaagacaactctgaagtatttctgagcgtcagtaatggctgctcgcttatctcagtgttaaaaataacaaggtctgctttagcaggaatgagaagagaaggagcctttgccggccttaaaggcattaagatcattaagctcatcttttccttttctgaacacaaacaaagcaatcaactaaaaagccctttttttttttttaatagctttagagattttcttaatgtggcccattctggtctcaaacataattgtgtaggtgaggcttccattgaacccttgtctttctggctccaccttctgggtgctgagagtacagatataccaccataccctcgttgtgtagccccgttaaagagagaaggtccttagacatcttttcttgggctacagggtaggtttgggagtaacaggattggaatggcttgtgtgtgctgtacatgaacccgggtcctctcatgtgctgcttgcttcttgctgctgctttctgcttctttgacattactaggtatatatggataaataaatgtataaatatatatatatatattttaattttctggagctttgggttcctgtagctcctgctgtcagtcaccctttcccacccctcacatccataatgttctttttttaaaaaacaaaaacaaaaaaaaccctcaatataatgataaaaaaaaaaaaaa

SEQ ID NO: 298 - DNA, 2567 bp, Mus musculus
gcgccatgtacgccctcgccctcttcgccagccttctggccaccgctctgaccagccctgtccaagacccgaagacatgctctgggggctcagcagtgctgtgcagagatgtgaagacggcggtggactgtggggccgtgaagcactgccagcagatggtctggagcaagcccacagcgaaatcccttccttgcgacatatgcaaaactgttgtcaccgaagctgggaacttgctgaaagataatgctacgcaggaggagatccttcattacctggagaagacctgtgagtggattcatgactccagcctgtcggcctcgtgcaaggaggtggttgactcttacctgcctgtcatcctggacatgattaagggcgagatgagcaaccctggggaagtgtgctctgcgctcaacctctgccagtcccttcaggagtacttggccgagcaaaaccagaaacagcttgagtccaacaagatcccggaggtggacatggcccgtgtggttgcccccttcatgtccaacatccctctcctgctgtaccctcaggatcacccccgcagccagccccaacctaaggctaacgaggacgtctgccaggactgtatgaagctggtgtctgatgtccagactgctgtgaagaccaactccagctttatccagggcttcgtggaccacgtgaaggaggattgtgaccgcttggggccaggcgtgtctgacatatgcaagaactacgtggaccagtattccgaggtctgtgtccagatgttgatgcacatgcaggatcagcaacccaaggaaatctgtgtgctggctggcttctgtaatgaggtcaagagagtgccaatgaagactctggtccctgccaccgagaccattaagaacatcctccctgccctggagatgatggacccctatgagcagaatctggtccaggcccacaatgtgattttatgccagacctgtcagtttgtgatgaataagttttctgagctgattgtcaataatgccactgaggagctcctagttaaaggtttgagcaacgcatgcggagtgctccccgatcctgccagaaccaagtgccaggaggtggtgggaacatttggcccctccctgttggacatctttatccatgaggtaaaccccagctctctgtgcggtgtgatcggcctctgtgctgcccgcccggagttggtggaggcacttgagcagcctgcgccagccattgtatctgcactgctcaaagagcccacaccgccaaagcagcccgcacagcccaagcagtcggcattgcccgcccatgtgcctcctcagaagaatggtgggttctgtgaggtgtgcaagaaactggtcctctatttggaacataacctggagaaaaacagcaccaaggaggaaatcctggccgcacttgagaagggctgcagcttcctgccagacccttaccagaagcagtgcgatgactttgtggctgagtatgagcccttgctattggagatcctcgtggaagtgatggatcctggatttgtgtgctcgaaaattggagtttgcccttctgcctataagctgctgctgggaaccgagaagtgtgtctggggccctagctactggtgtcagaacatggagactgccgcccgatgcaatgctgtcgatcattgcaaacgccatgtgtggaactagtttcccagctgcagaagtcacctacttgtgggtctagggtaatgaacacatagatctatttgacttaataagtaggaaccccctttgcccttcccccatctcctctcccttactgtagcatttctgtcatgtaagaggtgctgacagccacttccgtgtcccctttctgctcgaaggatgaggataccttgggacatcgctccccggctgcccttttcacccacctgctggaggggggtggtgagccagagggcaggagcattttctgagccctttcttggtgtgtgggggatctatggccatctcctaccatgagggagctacccagcttcctgtggtaccaaggagttattttggatgattagaagcacagaatgatcaggcctttagagcgatggaatggccattgtcatagcacagagatttcagaagcacctgcaggtggcttgcttgggatgttgctgtccctgggtcagccttccattctgctttcctgtcttcccgtctgccttgttggggttctgtggggtagggtggggaggggaaacttgtgaatgtaacttgcctgtgccgtgtgacgttcacgtgggcctggtcttttgtgtgtgaggcccttgaccgtgtggcctctgcctggactgtttggggtcctgcacggctttcccaccacctgtagctcttgttgacctgcctgttcacctcatgagtgaagcgtctgcctggcagtgggccatgaactgaggggtctctgtgtagagtagaagcttcctgtgcctccggttgccaggagacagcctgtgcagttaaatggacctagattttgttttgcactaaagtttctgtgacttaataaagttctgttaaccaacagaaaaaaaaaaaaaaaaa

SEQ ID NO: 299 - DNA, 2006 bp, Mus musculus
ggagctgctgccgtccggacacgagccggagcgagagcgggtccacaggccgcagccatgggtagccgcgtgtcccgagaggagttcgaatgggtctacacggaccagccccacgccgcccggcgcaaggagatcttagcaaagtatccagagatcaagtccttgatgaaacctgaccacaatctgatctggattgtagccatgatgcttctcgtccagctggcttcattttacttagtcaaagatttggactggaaatgggtcatattttggtcctatgtctttggcagctgccttaaccactccatgactctggctatccatgagatttcccacaatttcccctttggccaccacaaggccctgtggaaccgctggtttggaatgtttgctaacctctctctcggagtgccatactcgatttcctttaagagataccacatggatcaccaccggtacctcggagcggataagattgatgtagatattcccaccgatttcgagggctggttcttctgcaccactttcaggaaatttgtctgggttatccttcagcctctcttttatgcttttagacccctgttcatcaatcccaaacccattacctatctggaaatcatcaatactgtgatccagatcacctttgacattatcatttattatgtgtttggagtgaaatctttagtctacatgttggcagccaccttgcttggcctgggtttgcacccaatttctgggcattttatagccgaacattacatgttcttgaagggacacgaaacctactcctattatgggcctctgaacttgctcaccttcaatgtgggctatcataacgagcaccatgacttccccaacgttcctgggaaaaacctgcccatggtgaggaagatcgcaagtgagtactacgatgacctcccgcactacaactcctggatcaaggtgctctatgactttgtgacggatgacacaataagtccctactcgcggatgaagaggcctccgaaagggaacgagattctggagtaaatatcacagccaaaggaattcctgtccacggcttcaaaataggtgatagcgtggagtttttatctcgttaggcttatggtcagtgatgctcggaagctgggctggcatgattgccaactcagatctcggtgtcatcagaggctcctcagccttcagacagcccgacgacgacgcttgacgctagcggctgctgtgcttgctcactcccctgcactcacgagatgttattactgttactgagggcgtctttcctcgtgtctgtcatgctgtgagcaaatcataaaaagcttatattatttttcactataaagttactttattaaagcacctaataaactgaactgttaatcatatatattaataatattcattgcattattatatttctattgtattggtatacttaccagagtgctagggagaactttacaatttcatccagaaatttaattttgttaaaggcttgacttgagttcatatagtattgtgtgagttccctctggattcaatcatttgttcttagtggggaatggaaggcttataagtctcgggaaactgatgaaattctccatcacaaagtccaaagggtctttggacaagggtccaaacatgaagtgctttctggaggagcttttgtttagtccaacaggagtccaaggatgcagattagagttttgtgagtttgctgcccttgctgggctaggcatttcattgttgtaactgcctctgagtaactgatgatcctataagtaaccccaataaactctctggtttactaagctagccttagtggaatttctttggtctgtctctggtaccccacgtgatatcaacagaagaacagtttgtctctccctgggaagcagctgacagactgtgttcttgcacggctgtggaaaccctgtggcttggtgatgggtagtttgtctcaagaaactaacatcctgtgctattaataaagcagtcctggttacccc

SEQ ID NO: 300 - DNA, 1929 bp, Mus musculus
cgtccatctcctgctacaagagccgagaagagtccagtggtacacctgctcatcagctgaacctcagaggatgtgaagttactccggatgtaaacatttcaggccagaaatttaacataaaactcctaattccggtagcagagggcatgaatgagatctggcttcgctgtgataacgagaagcagtacgcgcactggatggcagcttgcaggttagcctccaaaggcaagaccatggcagacagttcttacaacctggaagttcagaacattctttccttcctgaaaatgcagcatctgaacccagacccccagctgatccctgaccagatcacaaccgacgtcaaccccgagtgtctggtgtccccgcggtacctgaagaagtataagagcaaacagataacagcacggatcttggaggcccatcaaaatgtagcccagatgagcctgattgaagccaagatgagattcattcaagcctggcagtctctgcctgagttcggcatcacacacttcattgcgaggtttcaaggcggcaagagagaagaacttattggaattgcatacaacaggttgattcggatggacgccagcacaggtgacgccatcaaaacctggcggttcagcaacatgaagcagtggaatgtcaactgggagatcaagatggtcactgtagagtttgcagatgaggtccggttgtccttcatctgtaccgaagtagactgcaaggtggtccacgaattcattggtggttacatatttctctcaactcgtgcgaaagaccaaaatgaaagtttagatgaggagatgttctacaaactcaccagtggttgggtgtgaataggaaaacttgtaataaaactccacagccataacaatatttaactttaaagctattgtttcttatatgctgcttaataaagtaagcttgaactttattattttatcatgatacctttttgccttaccagaccagtacatatgtgcactaacaagcacgattgttaatctgctgcctaccttgatatgccgtatgtggactgtggaattcccaacagtccttagggccacggaaagctgtcactgactgacagtaaccaaactaagaaacaagccatctaccaagccacccagggcatacatataacctatatgaagtctatttatcatgtgtaatgcatgtgtttgtgtttaattgatgccttcttttaaagtaccctgctcctggtacccagttaatcccctctcccagtataaagtcggtctacagtggatgcttggtatttgttgatgctgttgaccttgaaggaaacactgctaacctgttgttattgggtgggttttgtctttgagtaagcatgctgtacattgttttgtgtttagttttacaccaaactgtattacagtactcttagtattcaccagcatactcactatctgcctaagatatgcagcctttgtgttacaatatgaagtaaagatctatgaagtattcattttgtgtaactaatgtacaaacacaaattttataaaattgtacagttttttttaaaaaaaactattcacaactaggaaatggcttaaatgtagcatccttacattaattaagtgcttttaaaatatataattaatttgcagtttcagtatctgctaaattacgaatgacttcatgatgctcgtgacttgccgtgatgcccttaactacagcctggaccggctgtgttctagtctgttgcgctattacatctgcgttggtgctagttagacaattcctagctcacgagcccagaagggcgccagggaggggtggacttaccagtattgtccaataatccatgaattaaagactgtataaatgcattttattttaaataaaagtaaaaccttttttttaaaaaaaaaaaaaaaaaaaaaaaaaaaaaaaaaaaaa

SEQ ID NO: 301 - DNA, 1819 bp, Mus musculus
ggccgagcgttctctgtactccgagtgatcgctcctaccgtggctgccggggctggtatttcaaagcgtggttggtgagtgccccgtgaagcatagccggagggtgtggggagcagtgtcctgagttcctcgctcactggtgttcctagtctccaagctggcctcagggacgcccaggtggcagagcctgagatctggtggctctgagaaccattttgaccactgcttaagcttctgtagttggagtggcaagatcccacctgctaggtgaagggcagagagtgacttttgacctgtacctgctggtcctgacttgagaggcccgggatgggtgaattcaatgagaagaaggcaacatgtggcacagtctgcctcaagtacctgctctttacctacaactgctgcttctggctggccggcctggctgtcatggcagtgggcatctggacactggccctcaagagtgactacattagtctgctggcctcaagcacttacctagccacggcctacatcttagtggtggctggtgttgttgtcatggtgactggagtcctgggctgctgtgccactttcaaggagcgacggaacctgttacgcttgtacttcatcctgctcctcatcatcttcctcctggagatcattgctggcatcctggcctatgtctattatcagcagctgaacacagagctcaaggagaatctgaaggacaccatggtcaagagataccaccagtcaggccacgagggtgtgagcagcgctgtcgacaagctgcagcaagagttccactgttgtggcagcaacaactctcaagactggcaagacagcgagtggatccgctctggtgaggcagacagccgcgtggttcctgacagctgctgtaagactatggtagctggctgtggtaagcgggaccatgcctccaacatctataaagtggagggtggctgtatcactaagctggagaccttcattcaggagcacctgcgggtcattggggcggtgggcattggcatcgcctgtgtgcaggtcttcagcatgatcttcacctgctgcttgtaccgaagcctcaagctggaacactactgaccacgatgatgtcaggccgggcggccagccttgcactatgtgccagccccactactgaacactactgacttagactgctgactgccagaggtagctaccctcatgccatcgccatgacccccctggcatgccacctcaggggcatgcatcttcaagattgctttcactgcacaccaaagtcccaaagctcggaggcagcgaactgccccagcattaagggggggggaggggggttcaaatgccagggttggctaggcctgcctgtagaatagggtttagcttatttgacagaggtgcctattatgcagactgcttccctttgggttgctgtgatctgcagaaagtctgggagacctgtgataccactacacgttgggtaaaagcaggtgggcctttctggttggcttaggcacccttaatgcctgctaccaggaactctcagatctgttgccccaaacaaatggtgtaagctgagggaaactccaaccccacacttgatgctctgtcctctccacacaggcctcttgctcctaacagctcagccctggccttttctcactactgatagcatcatgtaaatgctccatgttcctgacactgtctccttttggagcatctctgaatggagcatggctgttttcatctcactgctgtattccagatgctgcccacaaatgctcctgctatgtaacaggtgctcaataaatgtaaatgtataagtaaaaaaaaa

SEQ ID NO: 302 - DNA, 4012 bp, Mus musculus
gtcctccctgcccgtaagagagctgcgccaccatggaggccaccggggtgctgccgttcgtgcgcggcgtggacctcagcggcaacgacttcaagggtggctacttccctgagaatgttaaggctatgaccagcctgcgatggctaaagctgaatcgcacaggcctctgctacctgcctgaagaacttgcggctctgcagaagctggagcacctgtctgtgagccacaaccatctgaccacgcttcacggcgaactgtctagcctgccttcgcttcgggccattgtagctcgggccaacagcctgaagaattccggagtccctgatgacatcttcaagctggatgatctctctgttctggacttgagccataaccagttgacagaatgcccacgggagctggagaatgccaagaacatgctggtgctcaacctcagccacaacggcatcgactccatccccaaccagctgttcatcaaccttacggacttgctgtacctggacctcagtgaaaaccgcctagagagccttccccctcaaatgcgccgcctcgtgcaccttcagacactggtgctgaatggaaacccgctgctacatgcacagctccggcagctcccagccatgatggccctacagaccctgcatctgaggaacactcaacgcacccagagcaacctccccaccagcctggagggcctgagcaacctttcagatgtggacctgtcgtgcaatgacttgacaagggtgccggagtgcctgtacaccctccccagcctgcgccgcctcaacctcagtagcaaccagattgcagagctgtccctgtgcatcgaccagtgggtgcacctggagaccttgaatctgtcccggaaccagctcacctccctgccttcagccatctgcaagctcaccaagctgaagaagctgtacctcaactccaacaagctggactttgatgggctgccttctggcatcggcaagctcaccagcctggaggaattcatggctgccaacaacaacctagaactgattcctgaaagtctctgcaggtgcccaaaactgaagaaactcgtcctgaataagaaccgcctggtgacccttcctgaggccatccacttcctgacagagatccaggtcctggatgttcgagaaaaccccagcttggtcatgccgcccaagcctgctgaccgcaccgccgagtggtacaacattgacttctcgctacagaaccagctgaggctggcgggcgcctccccggccacagtggctgctgctgcagctgtagggagcgggtccaaggaccccttggctcgcaagatgcggctacggaggcgcaaggactcagcacaggatgtccaggccaagcaagtgctaaagggcatgtcagatgttgcccaggagaaaaacaaaaaccaagaggaaagcatagatgcccgggcaccagggggaaaggtacgacgctgggaccagggcctggagaagccacgccttgactactcggagttctttacggaggatgtgggccagctgcctggtttgaccatctggcaaattgagaactttgtgcctgttctggtggaagaagccttccatggcaagttctacgaggctgactgctacattgtgctcaagaccttcctggatgacagcggctccctgaactgggagatctactactggattggtggggaggccacacttgacaagaaagcctgttccgccattcatgcagtcaatctgcgcaactacctgggtgctgagtgccgtactgttcgagaggagatgggtgacgagagtgaggagttcctgcaggtgtttgacaatgacatctcctacattgaaggcggaacagccagtggcttctatactgtggaagatacacactatgttaccaggatgtaccgtgtatatgggaaaaagaacatcaaattggagcctgtgcccctcaaagggtcctcactagatccaaggtttgtgtttctcctggaccaagggctggacatttatgtgtggcggggggcccaggccacactgagtaacacgactaaggccaggctctttgcagagaaaataaacaagaatgagcggaaagggaaggcggaaatcacactcctggtgcagggccaagagcccccagggttctgggatgtgctgggtggagagccttctgagatcaagaatcatgtgcctgatgacttttggccaccccagcccaagctatacaaggtgggcctgggtctgggctacttggagcttccgcagatcaactacaagctctcagtggaacacaaaaaacggcccaaggtggagctgatgccaggaatgaggctgctgcagagcctactggacacacgatgcgtgtacatcctggactgctggtctgatgtattcatctggctgggccgcaagtccccacgcctagtgcgtgcagcagcactcaaacttggccaggagctatgtgggatgctacaccggccacgacatacagtggtcagccgcagcctggagggcaccgaggcccaggtgttcaaggccaagttcaagaactgggacgatgtgttgacagtggactacacacggaatgcagaggctgtgcttcagggccagggcctctctgggaaggtgaagcgtgacactgagaagacagaccagatgaaggctgacctcactgcactcttcctacctcggcagccccccatgcccctggctgaggcagagcagctgatggaggagtggaatgaggacctggatggcatggagggcttcgtgctggagggccgcaagttcactcgactgccagaggaggagtttggccacttctacacacaggactgctatgtcttcctctgcaggtactgggtacctgtggagtacgaggaggaagagaagacagaagacaaggaggggaaggcctcggcagaggccagagaaggggaggaagcagcagcggaggcagaggagaagcagccagaggaggactttcagtgcatcgtttacttctggcagggccgggaggcctccaacatgggctggctgaccttcacattcagtcttcagaagaagtttgagagcctcttccctggcaagctggaggtagtacgtatgacacagcagcaggagaaccccaagttcctatcccatttcaaaagaaagttcatcattcaccgaggcaagaggaaggtgacccagggtactcttcagccgaccctctatcagatccgcaccaacggcagtgccctctgcacccggtgcatccagattaacactgactccagccttctcaactctgagttctgcttcatcctcaaggtcccctttgaaagcgaggacaaccaaggcattgtgtatgcctgggtaggtcgggcatcagaccccgacgaagccaagctggcagaggacatcctgaacactatgtttgatgcatcctacagcaaacaggtcatcaatgaaggcgaggagccagagaacttcttctgggtaggcattggtgcacagaaaccctatgatgacgatgcggagtacatgaagcacacgaggctcttcaggtgctccaatgagaagggttacttcgcagtgactgagaaatgctctgacttttgccaagatgacctggcagacgatgacatcatgctgctagacaatggccaagaagtctacatgtgggttgggacccagacaagccaagtggagatcaaactgagtctgaaggcttgccaggtatacatccagcacacacgctctaaagaacatgagcggccacgtcgcctgcgcctggtccgcaaaggtaatgagcagcgcgccttcacccgctgcttccacgcctggagcacgttccgccaagccccagcctaagcagtacctatgacctcagactccagtgaggaagaggaggactcctcgtacctgcttcagctagccacagcctgcaagcagcacacagccccaagccccaccagtgtgtccacatgtgtgcagatgtagtttaaaagatattaaatgcttttattttcaatatt

SEQ ID NO: 303 - DNA, 3860 bp, Mus musculus
gcagcatcccagcgctagagtcttctctgctcgctccagggccgtaccctgtcctctgcctcttctggcgccatggcgaagccgttgacggacagtgagaggcagaagcagatcagcgtgcgtggcatcgcggggctgggcgacgtggccgaggtgcggaagagcttcaacagacacctgcatttcacgctggtcaaggaccgcaatgtggccacgccccgcgactacttcttcgctctggcacacacagttcgcgaccacctagtgggccgctggatccgcacgcagcagcattactatgagcgggaccccaagcgcatctattacctttccctggaattctacatgggccgcacgctgcagaataccatggtgaacctgggccttcagactgcatgcgacgaagccacttatcagttggggttggacttggaagagctagaggagatagaggaggatgctggtcttgggaatggcggcctggggcgcctggcagcctgcttccttgattcaatggccaccctgggtctggctgcatacggctatggaatccgatatgaatttgggattttcaaccaaaagattgtcaatggctggcaggttgaagaagctgatgactggctacgctatggaaacccctgggagaaggcacggccggagtacatgctgccggtgcatttctacgggagggtggagcacacccctgacggggtcctctggctggacacgcaggtggtactcgctatgccctacgacaccccagtgcctgggtataagaacaacacagtcaacaccatgaggctctggtctgccaaggcacccaatgacttcaagctgaaggacttcaacgttggggactacatcgaagctgtcctggataggaacttggctgagaacatctccagggtcctgtatcccaatgacaatttcttcgaggggaaggagctgcggctgaagcaggagtactttgtggtggctgccaccctccaggacatcattcgaaggttcaagtcttccaggtttggctgccgggacccagtgagaacctgtttcgagacattcccagacaaggtagccatccagctgaatgacacccaccccgcgctctccatccctgagctcatgcggatcctggtggacgtggagaaggtggactgggataaggcctgggagatcaccaagaagacctgtgcctacaccaaccacacggtgctgcccgaggccctggagcgctggccagtgtctatgtttgagaagctgcttccgcggcacctggaaataatctatgccatcaaccagaggcacttggaccacgtggctgccctgtttcctggggacgtggaccgactgaggaggatgtccgtgattgaggaaggggactgcaagagaatcaacatggcacacctgtgtgtgattgggtcccacgctgtgaacggggtggcaaggattcactctgagatcgtgaagcagtctgtctttaaggacttttacgaactggagccagagaagttccagaacaagacaaatggcatcacgccccgacggtggctgctgttgtgtaacccggggctggcagaaatcattgtagagagaatcggggaaggtttcctgaccgatctgagccaactgaagaagctgctgtcactggttgatgatgaggccttcatcagagacgtagccaaggttaagcaggaaaacaagctgaagttctctgcccagctagagaaggagtacaaggtgaagatcaaccctgcatccatgtttgatgtgcacgtgaagaggatccacgaatataagcgacagctgctcaactgcctacacattatcaccctgtacaaccgaataaagaaggatccagccaaggcctttgtgcccaggactgttatgattgggggcaaggcagctcctggttaccacatggctaagatgatcatcaagctggtcacatccattggagatgttgtcaatcatgatccagttgtgggcgacaggctcagagtgatcttcctggagaactaccgtgtgtctttagctgagaaagtgatcccagcggctgacctgtcccagcagatctccactgcgggcactgaagcctcgggcacaggcaacatgaagttcatgctcaatggagcgctcaccatcggcaccatggatggtgccaacgtggagatggccgaggaggccggggaggagaacctcttcatctttggtatgcgggtggaagatgtcgaggccctggaccagaaagggtacaatgccagagaattctatgagcgcctgcctgagctgaggcaggctgtggatcagatcagcagtggcttcttttctcccaaagatccagactgcttcaaggacgtggttaacatgctgatgtaccacgacagattcaaggtatttgcagactatgaagcctacatccaatgccaggcccaggtggaccgtctataccggaattccaaggagtggactaaaaaggtgatcaggaatatagcctgctctggcaagttctccagtgaccggaccatcactgaatacgcccgggagatctggggtgtggagccctctgacctgcagatcccaccccccaacctccccaaggactaattaattatcccacacagtgagagcagtggcttgcttagctgactgtgcccacgccagtcttcaggcactgcaagcagccgctggtccctgctatccgaagtgccatgcttccaggaaggaccatgggaatggttttgaggacctggatgaggaagaaggcgtggcatcctcctggcttcttacagaagaactgttgcagagttcacagcacagatgggcagagatggtccccacagcttcagcccatcatcatccccagaggccgagcagggagggagtggagctgagcccctgaaatcctgcacgtagctgagtgagcttaagcctttagtttggggtgtgaatagggatctgtggtagccagtgttcctatgttctgctagtacctgggtcaccagccatagggtacagccagccccagtgtgtggtcttgttggcctgctgggtagaacctttgcttcaggcttcatgctcacagcttcctgtcctttgcccttgactgtactgagtatgtgggtggttgacccatataggccatgcctctagccatctgtggaaccctgtgggtgtcaagtagaacccagaacccctggagaggagcactgaagagagagagacctttatcccgtaactgagaccttggttgaggactggcaattttatagagggttggtttagttctttgctttttcaacaggaaataacacttcaggaggaactgaaactagctaagccttcctttttagcaagtaaaccttgaacttggtcagtgtggatatttctgctaggctgacgactaagctgctggccctgcagagggtccagtgtacactccactctgctacagcagcatggtgaggacccaccacaggagctgtgctcctcagagggcagaatctacattaagtgccgcccaaaggagagtgcgttgtcatagaaaccacataaaactatccttccagaggcttcaccaccttgcactgctctatctggttgggggtgggcaggagaacccctcgctttccccaccatgggagcatttgctgggaagtgtcttttcaggacttaaatcaccggagccactgtggtagcttgtgggggtgggtgggcaggttctagggctggtcatctgctgccctgtgcatgaggtcccctgaagccgcaatacatgaccacccttctactacttgctattacctccttgtatgagaaatggattaaacttctatgcctaaaaaaaaaaaaaaaaaaaaaaa

SEQ ID NO: 304 - DNA, 1586 bp, Mus musculus
atgggggcgatggctccgcgcacgctgctcctgctgctggcggccgccctgggtccgactcagacccgcgctggctcacactcgctgaggtatttcgtcaccgccgtgtcccggcccggcttcggggagccccggtacatggaagtcggctacgtggacaacacggagttcgtgcgcttcgacagcgacgcggagaatccgagatatgagccgcgggcgcggtggatagagcaggaggggccggagtattgggagcgggagacacggagagccaagggcaatgagcagagtttccgagtggacctgaggaccgcgctgcgctactacaaccagagcgcgggcggctctcacacactccagtggatggctggctgtgacgtggagtcggacgggcgcctcctccgcgggtactggcagttcgcctacgacggctgcgattacatcgccctgaacgaagacctgaaaacgtggacggcggcggacatggcggcgcagatcacccgacgcaagtgggagcaggctggtgctgcagagagagaccgggcctacctggagggcgagtgcgtggagtggctccgcagatacctgaagaacgggaatgctacgctgctgcgcacagatcccccaaaggcccatgtgacccatcaccgcagacctgaaggtgatgtcaccctgaggtgctgggccctgggcttctaccctgctgacatcaccctgacctggcagttgaatggggaggagctgacccaggaaatggagcttgtggagaccaggcctgcaggggatggaaccttccagaagtgggcatctgtggtggtgcctcttgggaaggagcagaagtacacatgccatgtggaacatgaggggctgcctgagcccctcaccctgagatggggcaaggaggagcctccttcatccaccaagactaacacagtaatcattgctgttccggttgtccttggagctgtggtcatccttggagctgtgatggcttttgtgatgaagaggaggagaaacacaggtggaaaaggaggggactatgctctggctccaggctcccagagctctgatatgtctctcccagattgtaaagtgtgaagacagctgcctggtgtggacttggtgacagacaatgtcttcacacatctcctgtgacatccagagccctcagttctctttagtcaagtgtctgatgttccctgtgagtctgcgggctcaaagtgaagaactgtggagcccagtccacccctgcacaccaggaccctatccctgcactgccctgtgttcccttccacagccaaccttgctgctccagccaaacattggtggacatctgcagcctgtcagctccatgctaccctgaccttcaactcctcacttccacactgagaataataatttgaatgtgggtggctggagagatggctcagcgctgactgctcttccaaaggtcctgagttcaaatcccagcaaccacatggtggctcacaaccatctgtaatgggatctaacaccctcttctgcagtgtctgaagacagctgcagtgtacttacatataataataaataagtctttaaaaaactta

SEQ ID NO: 305 - DNA, 3912 bp, Mus musculus
gttgatgggtctggccggtctcctgacatgaagcccccctaggcccagaggttggttcctgctgtgacatgcctgccatgtggccacttcttcatgtcctctggcttgctctggtctgtggctctgttcacaccaccctgtcaaagtcagatgccaaaaaagctgcctcaaagatgctgctggaaaagactcagttttcagataaacctgtccaagatcggggtctggtggtgacggacatcaaagctgaggatgtggttcttgaacatcgtagctactgctcatcaagggctcgggagagaaactttgctggagaggtcctaggctacgtcactccatggaacagccatggctacgatgttgccaaggtctttgggagcaagttcacacagatctcaccagtctggttgcaactgaagagacgtggtcgtgagatgtttgaaattacaggcctccatgatgtggaccaagggtggatgcgagctgtcaagaagcatgccaaaggtgtgcgcatagtgcctcgacttctgtttgaagactggacttatgatgatttccgaaacgtcttagacagtgaggatgagatagaagagctcagcaagactgtggcacaggtggcaaagaaccagcattttgacggttttgtggtggaggtctggagccagttgctgagccagaaacatgtaggcctcattcacatgcttactcacttggctgaggcgctgcaccaggccaggctgctggtcattctggtcatcccacctgctgtcacgccggggtacgtacagacgctgaaggaccacaggccccgagtggtgtgggacagccaggctgcggagcacttctttgagtacaagaagaatcgcggcgggaggcatgttgtcttctacccaactctgaagtctctgcaggtgcggctggagctagccagggagcttggcgtcggggtctccatctgggagctgggccaaggcctggattacttctatgacctgctgtaggctggaaagcaacccccaagtgactggacttttctaagccatggagtgactggtgaaatataggccttttctctgtttaccatgagacagctgctatgggtccacacgcatgggtgtctcctagtccaggatttgaatcggaatcctttctactcactactcactgctgcctgctgtgggccaggtgaaaacgcaacccccatcccctaggacagcctggctctggactcaggcctcgagtgcttttcaaggcctgtgtgggatgtgggtttggaagatgtgaacaatcacagactcttctaaacagcccttctcagcatcacccttaagcctgacaggccctgccttcatactatgatcacctgcctaccacaaacacgggtatattcaaggtacctgatacctggagcaggttctacacctacccccactgggcttgatgtgaccaggttgtgcgatcatgttggaaactggcccagagaagctggacttacttctgtgaaacaccatgggccatagccctgactgtccaccagataacaggataggatcagcccatggggcagcagaaggacctgtgggctgagtgggacaggtatcatgagatcagaagggatctgtctatcttagtaaacagcaacaggctgatccagtgctggggagatgtccaagacttctaaggcaccaacaggtgaagaatggctgacctacttatttcttcactccttcattccaagtgccctcatcccctgctggatatgatctcaaggtagtgatctctggtgctgcgggccattgggtggagctttctaatccactagccaagcctgagccatagagatcataaaccctaactaggcttttaccctgtgagtttctgagatttgtggctcaagatccttagtgttaggaacggggaggatgctaaaacagcgggcctaggcctgactcaaaaggctgaacctctcccactctggagtgggtagtcctacctacgtcagttgaaccacctattgaccttaacctactggaatagaggtatccctgaacattcactgagctcagtgtgaccaaggctgagaacctgggatgctaggtcaggggttcctgagatggatagactctgccaactatctgatacctgtaaaggccttgggggctacactgaccccgctgactttgagaagacacaactctacagaccccagttaaggatagtcaggacaagaaggccagtgtgagggacagaggcatcttgacccccccatactataagaagtggtcatcagtgcgctcatgtgctatgtgtggtatgaggtagtagacgttggaacactggctggtacggtggggccatgagcctgctcccacactggctgctcagccagagctgagtcctagccttgagtccaagggtttagtggatgggagtagtctccgaatataagaagtgagtgacatggagttctcctagttgtgggcagagcactggtgaagcaggctggggaacagccttctgcaagcagatggagtgattaaggtggcatgggggacaagcagaataggtcagagtgccacagtcaagggtcctgctggagagtcaaatgatagaagtagatgggaacttggctgagttctctggggccacagaaaagtgagcagccagctcagcctcttggctttctttccctcattgatgctggagattgaccccaagcaccatgcagggacatccgcactgagcagtaaccttcaggttctgggtttgagtcagcaaagttgaggtatgcagagatgctgtccaagagctaacagactggtagatagaaattcagtcagagagtggcaaggtagtcagtggctatggtgagctggtgaccatgagccatggatggcagctgcttagcttggggaggagaggggagaaagggcatcctgggacttgaggagggtcagcaccccactgtactttgagtacaacttctcagtttggccatctgtaagtaacaggtttttttgctaattagcagcctgcctggagcagctgactccacagttaactcagggtcctatggcttctaactagaaagacgacagtgggccacaaggactcagcccagagccagagatatctgggtcacactcaggtgtgtgagtcacaatgactcctaatgaggactgtgctcagagtaggctcctcacacagcagggtgtggagactgagagtcagatggctcacagctcctgagggtcctgggagctcatcttagcctgaacccccagagtaccatccctatagtcaaaggccctcacctatagctcttctttatcccctagttaagaagacactgcctttgatgtcttgatggtggcttgatgttctatatgactctaactctggccagtggcaaaggctctgtgtctcctagtgttgcaatttgcagtctctccagactaatccaggggcagaggtactaggacagagatacaagagtaactgaggtagcccaggagaaacaggagagaacggaggccaccccttcccccaactaagaggttagcagtgttcccctgagctccgagctctgctgacccttggaaaatgaaagaacttcctcagttgaaggctgtacaacctttgtgtgttggcaagacccacagtctgctcacacactttattaagatgcatctggaaccacgacactgtcatggaatgtggatcatgggacctggccctgcctggagcaccaagatcatcgtgggccttgagcagactgggcctgcccccaacctagcaaccatgcaaggctgggaaccccatcctgtgtgaacactggaaggtatatatggatataaaaagtgtcaaagttccctgggcccttagccctgggtgccatttggcaccaactcc

SEQ ID NO: 306 - DNA, 1624 bp, Mus musculus
tgtgggtggggatgggggaggtgggcgggacagcggaggatgagtccccggcctagtctaccgcttccctccagggcggtgggtgagccgcttccctccagggcggtgggtgaggcagtgaggcccaggctcgaccagatagcgccgctatgtggcccccggacgcagagccagagcccgatccagagtccgcgcatggcccccgaagtggcaggacagtgccgggactccgagccctgttgcccgcgcgcgccttcctctgctctctcaaaggccgcctcctgctggccgagtcgggtctttcattcatcaccttcatctgctacgtggtgtcctccgcatctgccttcctcacagtgcctctgctggagtttctgttggccgtttacttcctctttgctgatgccatgcagctgaatgacaaatggcagggtttgtgctggcccatgatggacttcctgcgctgtgtcaccgctgccctcatctacttcgtcatctccatcactgctgtcgccaaatactcagatggggcttacaaagcagctggagtttttggcttttttgccacaattgtgttcgcaattgacttctacctgatctttaatgaagtggccaaattcctcaagcaaggagactctgggaatgagaccacagcccataggacagaagaagagaactccaactcggactcagactctgactaaaggcctgtctgagcttaacaactagagccactcggccctctcacccacgctgtcctgacggggctcctggagcatggcaggaatgcccatgggagaacagaccgaggagcccgtctctcaagattacactcccgaggcctcacattcaaaattggctgtgctggcttggcactgctgagctagcgtggtagggcacgttgacaagccttccttctcccctttctgtccttgagcccctttaacctcactgcccccaccgaagcacacatcaaacggagccaatcactacagccaatcatgtggcagcatgggggtggggtgggactttctgttactaacagggacagataaaaccacagcaggctggaccaccagccccaaacctgcactgcattgagatgactttcaggaaccttttattcaagaagtttccctcctcactgtgaaatagggagaaacctagctagccaagtcttccattagaggtctgaggccttttcagaaacggacccaaagatttgtttactagggcccagagacagggagccaaccagtatagtggcagtgaccaagtcacaagtggctgggcaggcccagccaagcactctcttcctggggaccctaaaagacaaagtgcttcctctggacacctgggcaggaccactggtgacatggacttctctgtagtcccttgggggcggttactgtgtgtgtctttgatggtgttttctaacttttttatatttttttaatacaaaaacaatgtaacaaatggtcttttctgtaacctaagaggccccatgaataagggcccatgtcttgggcatttgtaacctttttatcttgcatgtgaattccctccctttaaaaaaaaaagtcacaatggattaaaacaaactgactacaaaaaaaaaaaaaaa

SEQ ID NO: 307 - DNA, 1684 bp, Mus musculus
ccacgcgtccgcggacgcgtgggtcacggccccttggtagcccccttttgaagcatagggttccttcttctctggaagagtctccaagtctactcctcaagctccatcttggctcaggatgcttctccttccttctatctctgctttcctgtaggactctggggagggagggatgtgttggacagaggatgtgactctggaaacagggctgaggctggggaggtcagagtctggctttaccttccatagttatcagtgcctcacgcctgcgttctaagagcagggcctttgagaccacgcagaggtgggacagctgtggggacacggggtgttctttttctttgtttctgaacactgggaggagggatatcagagagccactatctggagcggtgccagaagtggtgagaggcttcttggtgcctagggctttagttcctgctctgcagaggaagcagagggattctgggtggccagggcagggatagcactgggggtctagagggggccagcacccagacaactgagactttattcctggaacctcaagggaaggtgtgaacctgaggccttcatttgtgtttctcttcgtccctcctgaaaagttgtcagactcctgtgctttcggctctgaggtgcacggcaggaaagatggtccagagcacagtgactgtgaatggagtcaaagtggcctccacacatccccagtccgctcacatcagcatccacatccaccaaaaatctgctttggagcagctgctgggagctgtgggctccctgaagaagtttctctcctggcctcaggccagaatccactatgggcagctgtctctaggggtgacccagatattgctggggcttgtgagctgtgctcttggagtatgtctctacttcgggccttggactgagctgtgcgcctttggctgtgctttctggtcggggtctgtggcaattctagctggagttggtactattgtccatgagaagaggcagggaaaactgtccggccaggtatcatgtctcctcctcctggcttgcattgccacagctgcagctgctaccgttctgggtgtgaacagcttaatcaggcaaaccagtgttccctactacgtcgagatcttttccacatgcaaccccttgcaatcaagcatggaccctgggtatgggacagtgcgatacagtgatgattcagactggaagacagagaggtgcagagagtacctgaacatgatgatgaacttgttcctagcgttctgcatcatgctcacagtggtctgtatcctggagattgttgtgtctgtggcttccctgggactaagtctccgaagtatgtatggccggagctcccaggccctgaatgaagaagagtcagagaggaagcttcttgatgggcatccagcacctgcgtccccggccaaagagaagatccctgctatcctgtgatccgcccacacccacgtgtccctgtccatagtaatccagggaggacgcgactgttcccagggcctcttctggccccgcagcacacacctacttctgatgtagccactattcagccctctttctctccctctctccccactgtcctcacgccaatgtcctttcttccacgaacagatattatgtcattttatccaatgccgataaaggagaaacaacttgaaaataaaaaaaaaaaaaaaag

SEQ ID NO: 308 - DNA, 961 bp, Mus musculus
attcctgtaatggctgctttcggtccggctgtgtcacgagtaacctcttagcctcagcatccggaagttccaaagagaatatttcacgttgggtagaattacttatacccttgtttcggcaagttcagccctccagatcctagcatcatgaattcagtttcaacgcaattgatcttagtcctcgcttcgctgcttttgatcctgcctgttgttgaagcagtggaagctggagacgcgattgcactcttattaggtgtggttctcagcattaccggcatctgtgcttgcttgtgggatatacgcaagaaagcgaaatggacagatgtgactctgaaggactcttctgaattagactgcaccctgaccagtgtgctgaaaaccattgttctgttgaggccgaccccaagatttgatctctcccgttctcagcaagagggttacagttagctgagagttaacactctcagttaagagatgctttcacgttcatacttgtttcttctacaatgggggcagatgggagtggagggcagatgggagtggagggcggctcttaacaacaaagagtgcactaataatgtggcccataacttgtatttgctgcttgggaaggggccaaagtgagagggcttaagtttgcaaaagtattatttcatactttcaagttgtcagagcacatggaattggaagatggaagtatttgttcagaatctagtaaatctatatttttataatcactgcctcttgcattctggggatctctctctctcactctcactctcactctctcagagaaccggttggggtgggttttggatttgttttattgttgttactggttttctttttttttaatgcttctgtttttatctcgcaagttgatattgtacttagatcttagccaaaaacttttatctctgagaaaaagtttaataaaaatgtactaaacatatctaatacc

SEQ ID NO: 309 - DNA, 2804 bp, Mus musculus
acggggaaaagaaaccgcccatcacacaccccagcacatcagcccaggaaacttataacctcgggagtcaggtccctcccctcactgtggttgcaaatctcctgaagagaggaccagaccagcagcctgctctaccacccagggcatctgcctctctcactggatactccagaattctctactcagaagtcaccaaaaagccaagatgttggtgctactggctggtctctttgtggtccacattgccactgccattatgctgtttgtctccaccattgccaacgtctggatggttgcagattacgcaaatgcatctgtagggctttggaagaactgcactggtggtaactgcgacggctccctgtcctacggcaatgaagatgctatcaaggcagtgcaagccttcatgatcctctccatcatcttctccatcatctccctcgtggtcttcgtgttccagctcttcactatggagaagggaaaccggttcttcctctcggggtccaccatgctggtgtgctggctgtgtatcctggttggagtgtcaatctacactcatcattacgcccacagcgaagggaacttcaactccagcagccaccaaggctattgtttcatcctgacctggatctgcttctgtttcagcttcatcatcggcatactctatatggtcctgaggaagaaataagccgaatacgctcatgggcgtctgggggcggggtgggctgggtaggaggaagcaacctaacctgggagggaagcaggagtcactgtgtaggaataacagagaggggaggggggtggggagagggaaggaagagggggagaggcccaaacccaaaccatatctggggcggtgggattctctactgccaagcacccatccttggaagaaagttgttggctgatatgctgatgcttccttgacgtcaccagagagtcctcctctagccaccaaatatggccccgtccatcctcaattacatacactcggggcctccccagctgccataccactggcgccactcttgagggtggctgctgggtcacacactgaggtcttccacatccatatcatcaagttctgatggtggttcaggtcttagcaagagcagatattgctcgatgctgaggctaagtctggaagccactttgtccttgtgacctaaaaccaaacatcaaatccagatcccatgtgcctgtagtgggagctttggccaggaagccaatgtgcatatttggtggcctttctaacaaaagtataggatgatgagagatggtttgtaagttcaagctgatggaattggtttagccaagaaatggaagtttctaccccagaggatcttggagacaggtggggacaggcagtgctcctcagtcacgtgtcaccgagctgtccctcatggaggcctcctgttgtgaactctgctagactctcacttacagccaaggcagcttttctggagtttttctagattctctagagccaaagatgataatgcctcacaaaacatagggtcaaagcatatgcccaccgcagtgctatagtaagtttgtgggtttttaggattcccccaaagcactcaatgtatcttgtatatgtaacaggggagaaatgcatgtgttcctttgacatacaattctgaactaggaatatttgaggaagtccaatgatgaccaacaacactggggaccagaatataacatctaaatgcagtagtcactgttgctttgacctgggctggagtggtctcctctcaacagctttcatcacactattttccagctaaagatggcaaagctgtaagccaattaacatatacaccaacctaaactaaagaaccagtcctgagggtgtgagaaaggtgctatctggttatggattattaagcaaaccatatttcatttatgttgagaagagaatgcctgccctcagggaaaaaaaaatgtaattgtgtgagatgaataaagtcctggtgataggcagacagtttcttttttaaaacaggagaaactcttagggcatccagacagatggtagctaaattgttggggctgcaggggtattcctgtataagacttagaggtagtatgatatctcagatttctgccttaaagggctttctttttagaaatagtttcttttattgcccttagaagatcacccccaggaagagtatgagctatcttttctacatttcttttcctaggaatattcttatccatttcttatatacatttcttttgggagggagtttttatgctatagttgctggtatttatgtaaagggaccattactaagtgtatttctctagcatattatgtttaagggactgttcaaggtaggttactgaactgccgggctgatgttagagacactggccagaaaagctataataagttcttaaattataatttgatcactatacatttgttctatgctgccttatgttcataagaatatcaacagacagctagagccagaaaaaaatagtcacattttgttaaaaagttgaattatgactggagtgaaccgtgcattcccttgccttttactttttttctgtgacatttacgtctcatgtaatttgcatcgcattggtgggttattctagtactgtatttggcttcttcattaataggatatttcacatactataattgtaaatattttgatacaaatgtttataactctagggatataaaaacaaattctgattccctaaaaaaaaaaaaaaaaaaaaaaaaaaaaaaaaaaaaaaaaaaaaaaaaaaaaaaaaaaaaaaaaaaaaaaaaaaaaaaa

SEQ ID NO: 310 - DNA, 2377 bp, Mus musculus
cgctttggtctcggagctggcagcgccgccggtgcccatagacagctgccgggcaactggtagctgttcttagctgtgcccagtccttctggaacacatcctgtgtgaggtccctccagctataaggtgggcaccatgtcggagaagttcgactgtcactactgcagggaccccttgcaggggaagaagtacgtgcagaaggatggccgtcactgctgcctgaagtgctttgacaagttctgcgccaacacctgcgtggactgccgcaagcccataagcgctgatgccaaggaggtgcattataagaatcgctactggcacgacaactgcttccgctgtgccaagtgccttcaccccttggccagtgagacctttgtgtccaaggatggcaagatcctgtgcaacaagtgcgctactcgggaggacttccccaggtgcaaagggtgcttcaaggccattgtggcaggagaccagaacgtggagtacaagggcaccgtctggcataaagactgcttcacctgcagcaactgcaagcaagtcattgggaccggaagcttcttcccgaaaggtgaggacttctactgtgtgacttgccatgagaccaagttcgccaaacattgcgtgaagtgcaacaaggccatcacatctggaggaatcacttaccaggatcagccctggcatgccgagtgctttgtgtgtgttacctgctctaagaagctggctgggcagcgtttcaccgctgtggaggaccagtattactgcgtggattgctacaagaactttgtggccaagaagtgtgctggatgcaagaaccccatcactgggtttggtaaaggctccagtgtggtggcctatgaaggacaatcctggcacgactactgcttccactgcaaaaaatgctccgtgaatctggccaacaagcgctttgtatttcataatgagcaggtgtattgccctgactgtgccaaaaagctgtaacttgacaggggctcctgtcctgtaaaatggcattggaaccattctttgtgtcctttgctccctccctccctctgtaccatccatagggcaagagtgggctttcacctctttaaagttgctctttccgtcttttctcccattttacagtattaatcaacgaaggacacacagtgatcatattaagatttagcaaagagcaaccttgcagcaaaaataatttctctgttgctgcactggaaaaacaaaaccttagactgactcttctgcatgtttctcatagagcagaaaagtgctaaccatgtagccacttcacgatgtaaacgagaagcataggcgataaagctcccactgagacacctttggggctcagtctggatgcgctgtgcggtcacgtgactgcggtgtaagagttgcagcggctgctccaactcccttctcgccttctctgggcagttaagaacttgccagaatgcatggtttaacttccttatcaaaactctgaccttccttctgttcttttgtgctttcacacgactaacacagatttccagagaattaacattttgaactttgttgtaattctcaagtgacttttcccccatactaacatttgactcccttacgtggcgtgttctctgagcgttcctactttaaagcatggaacacacaggtgatttgaagcatctaagcagatctgagaaaacgagcctgtttcagaacaaactcaccacagtgactacttcggaagcttaacaagactaactctcctgtcctttttaatttttttttttaaattttgttttaatgagtagtaaaatagtttatgggtttggaaacttgcatgacaatatttgagcctcctcaaacgttcctgcagttttgagattcatcctgtagacatgacaaaaactctagagccgcagctgagcaggcacagggctgtcatcaaagtagggacaaggtgaagtccttgtaacataaccgttgtctgctctttgtctgcatccaggaagagtgcaaagtccctttgcttgtgattcttagaactttccctccagaattgcagttagactctggggctgtcggaggtggtcgtcatccttcacaggcaggactgggttttcacccccttctctgaaacgcaggattgcctccttaactgtactctccattttattacatatataacgagccaatatcaaagtaaagatgtaatgaaaacacacactcatatattactgtaggagtggttatagatgccaacacctcatttccatatttgtcattagctgtttccatctactgtttgattgtatccttacaaaaataaagcagcatagaaagagatagaaagatattgtgtgtttgcgtggagtatagaaataaaaaagggtgtcgg

SEQ ID NO: 311 - DNA, 10258 bp, Mus musculus
aattccgagggcgagcgagcgggccgggaccggcagagcccacttctctccgcggcgcagcgcaaagctgggcagggggcgccgcgggacccgcgcaaccacagccggcttggggagctgctctgctccctgtttccccccacttttttcttcccctttctggaagggtttgtgcaggggtagggaaaacagactcaaacagcaaagtggaaaacagttaatgaccagccacagagtcacagctctgtgctctggctgctccctccagggctctcgagccgcagacgcaggtcgctgtgggtgccggctgtggtgacatggcttgttggcctcagttaaggctgctgctgtggaagaatctgacatttcgaaggagacaaacatgtcagctgttactggaagtggcctggcctctctttatcttcctgatcctgatctctgtacgcctgagctacccaccctacgaacaacatgagtgccactttccgaataaagccatgccgtctgcaggaaccctcccctgggtacaggggattatctgtaatgccaacaacccctgcttccgttatccaactcccggcgaggctcccggtgttgttggaaactttaacaagtccatcgtgtctcgcctgttctcagacgctcagaggcttcttctgtacagccaaagagataccagcattaaggacatgcacaaggtcctgagaatgttacggcagatcaagcatcccaactcaaatttgaagctccaggattttctggtggacaatgaaacattctctggattcctgcagcacaatttgtcccttccaagatctactgtggacagcctgctgcaggcgaatgttggtctccagaaggtatttttgcaaggctaccaattacatttggccagtctgtgtaacggatcaaaattagaagaaattattcagcttggtgatgcggaagtttctgccctctgtggtctaccgaggaagaagctcgatgcagccgagagagtactgcgctacaacatggacatcctgaagccagttgtgacaaaactaaattccacatctcatctcccgacccagcatctggctgaagccaccacagtgttgcttgacagcttggggggcctggcccaagagctgttcagcacaaagagctggagcgacatgcggcaggaggtgatgtttctgaccaacgtgaacagctccagctcctccacccagatctaccaggcagtgtcccgcatcgtgtgtggtcacccagagggtgggggcctgaagatcaagtccctcaactggtacgaggataacaactacaaagccctctttggagggaataacaccgaggaagacgtggacaccttctatgacaattctacaactccttattgcaatgatttgatgaagaacttggagtctagtcctctttctcgaattatttggaaggcactcaagccactgcttgttggaaagattctctatacacctgacacaccagctacaaggcaggtcatggctgaggtgaacaagacctttcaggagttggctgtgttccatgacctggagggcatgtgggaagaactcagcccccaaatttggaccttcatggagaacagccaagagatggaccttgtccggacgctgttagacagcagaggcaatgaccagttttgggaacagaagttggatggattagattggactgcccaagacatcatggcgtttctggccaagaacccagaagatgttcagtccccaaatggctctgtgtatacctggagagaagctttcaatgagaccaaccaggcaatccagacgatatctcgattcatggagtgtgtcaacctgaacaagctggaacccattccgacagaagtcaggctcatcaacaagtccatggagctgctggacgagaggaagttctgggctggcatcgtgttcacaggcatcactccagatagtgtggagctgccccatcatgtaaagtacaagatccggatggacattgacaacgtggagagaactaataagatcaaggatgggtactgggaccctggtcctcgggctgacccttttgaagatatgcgctatgtctggggcggcttcgcctacttgcaggatgtggtggaacaggccatcatcagagtgctgacgggatctgagaagaaaacgggtgtctacgtgcaacagatgccctacccctgttatgttgatgacatttttctgcgggtcatgagccggtcaatgcccctcttcatgactctagcctggatctactctgtcgctgtgatcatcaagagcattgtgtatgagaaggaggctcggctgaaggagaccatgcggatcatgggtctggacaatggcatcctctggtttagctggtttgttagcagcctcatccctctgcttgtgagcgctggcctgctggtggtcatcttgaagttaggaaacctgctgccctatagtgaccccagcgtggtgttcgtcttcctgtctgtgtttgccatggtgaccatcctacagtgcttcctcattagcacgctcttctcccgtgccaacctggcagcagcctgtgggggcatcatctacttcacgctgtacctgccctatgtgctgtgcgtagcctggcaggactatgtgggcttctccatcaagatctttgctagcctgctgtctcctgtggcttttggattcggctgtgagtatttcgcccttttcgaggagcaaggtatcggggtccaatgggacaatctctttgagagcccggtggaggaggacggcttcaatctcaccactgcagtgtccatgatgctctttgacacctttctctatggcgtgatgacatggtacatcgaagccgtctttccaggacagtatggaattcccaggccctggtattttccttgtaccaagtcatactggtttggtgaggaaattgatgagaagagccaccctggttccagccagaagggagtgtcagaaatctgcatggaagaggaacccactcatctgaggctgggggtgtccattcagaacctggtgaaggtttaccgagatggcatgaaggttgctgtggatggcttggcgctcaacttttacgaaggccagattacctccttcctgggccacaatggagcagggaagaccaccaccatgtcaatactgactgggctgtttcccccaacttctggcacggcctacatcctggggaaggacattcgctcggagatgagctccatccggcagaacctgggagtctgtccccagcataatgtgctgtttgacatgctgactgtcgaagagcacatctggttctatgcgcgcctaaaggggctctcagagaagcacgtgaaagcagagatggagcagatggccctggatgttggcttacccccgagcaagctgaaaagcaaaacgagtcagctctcaggtgggatgcagagaaagctgtctgtggccttggccttcgtgggtggatccaaggttgtcattctggacgagcccacagccggggtggacccgtactctcgcaggggaatatgggaactcctgctaaaataccggcaaggccgcaccattattttgtctacacaccacatggacgaagctgacatccttggggacagaattgccatcatttcccatgggaagctgtgttgtgtgggctcctccctgtttttgaaaaaccagttgggaacgggttactatctgaccctggttaagaaagatgtggaatcgtccctcagttcctgcagaaacagtagcagcaccgtgtcttgtctgaaaaaggaggacagtgtttctcagagcagttctgatgctggcctgggcagcgaccatgaaagtgacacgctgaccatcgatgtctctgctatctccaacctcatcaggaagcacgtgtctgaagcccggctggtggaggacattgggcacgagctgacctatgtgctgccgtacgaagccgcgaaggagggagcctttgtggaactcttccatgagattgatgaccggctctcagacctgggcatctccagttatggcatctcggagaccaccctggaagaaatattcctcaaagtggctgaagagagcggggtggatgctgagacctcagatggtactttgccagcaagacgaaacagacgggccttcggggacaagcagagctgtctgcacccatttacggaagatgatgctgttgatcccaatgactctgacatagacccagaatccagggagaccgacctgctcagtgggatggacggcaaaggctcctaccagctgaagggctggaaactcacccagcaacagtttgtggcccttttgtggaagaggctgctgattgccagacggagccggaagggtttctttgctcagattgtcctgccagctgtctttgtttgcattgccctggtcttcagcctgattgtgccaccctttggcaagtaccccagcctggaacttcagccctggatgtataatgagcagtatacatttgtcagtaatgatgctcccgaggacatgggcacccaggaactcctgaatgctctgaccaaagatccaggctttgggacccgctgtatggaaggaaacccaatcccagataccccttgcttggctggggaggaggactggaccatcagccccgtcccccagagcatcgtggacctcttccagaatggaaactggaccatgaagaacccctcacctgcgtgccagtgtagcagtgacaaaatcaagaagatgctgcctgtgtgtcccccaggggcaggggggctgccacctcctcagagaaaacagaaaaccgcagacatccttcagaatctgacaggaagaaatatttcagattacctggtgaagacgtacgtgcagatcatagcaaagagcttaaagaataagatctgggtgaacgagtttcggtatggcgggttttccctgggtgtcagtaattctcaagcacttcctccgagccatgaagttaatgatgctatcaagcaaatgaagaaactcctgaagctgaccaaggacacgtccgcagatcgcttcctcagcagcctgggaaggttcatggcagggctggatacgaaaaacaatgtcaaggtgtggttcaataacaagggctggcatgctatcagttcgttcctgaatgtcatcaacaatgccattctccgggccaacctgcagaagggagagaacccgagccagtatggaatcactgctttcaaccaccccttgaacctcactaaacagcagctctcagaggtggctctgatgaccacctctgtcgacgtcctcgtgtctatctgtgtcatctttgcgatgtcctttgtccctgccagctttgttgtgttcctgatccaggagcgtgtgagcaaagccaagcatcttcagttcatcagcggcgtgaagcctgtcatctactggctgtccaattttgtctgggatatgtgcaattatgtggtccctgctacactggtcattatcatcttcatctgcttccagcagaagtcctatgtgtcctctaccaacctgcccgttctagcccttctgctcttgctgtatgggtggtcgatcactcctctcatgtatccagcatcctttgtgttcaagatccccagcaccgcctatgtggttctcaccagtgtgaacctcttcatcggcatcaatggcagtgtggccactttcgtactggagctgtttacaaacaataagctcaatgacatcaatgacatcctgaagtctgtgtttcttatcttcccacatttttgcctggggcgagggctcatcgacatggtgaagaaccaggccatggccgatgccctggagaggtttggggagaaccgcttcgtctctccgctctcttgggacttggtaggacggaacctttttgccatggccgtggaaggggtggtgttcttcctcattactgttctgatccagtacagatttttcatcaggcccagacctgtaaaggcgaagcttcctcctttgaatgacgaggatgaggatgtgaggcgggagagacagaggattctggacggtggcggacagaatgacatcctagagatcaaggaactgaccaagatctataggaggaagcggaagcctgcagtcgacaggatctgcatcggcatccctcccggagagtgctttggactcctgggagttaacggagctgggaagtcaacaactttcaagatgctgactggagacacccctgtgaccagaggggatgcgttccttaacaaaaacagcatcttatcaaatatccatgaagtacaccagaacatgggctactgccctcagtttgacgccatcacagagctgctgacgggaagagagcatgtggagttctttgccctcctgaggggagtcccagaaaaggaagttggcaagtttggtgaatgggcaattcgcaaactgggcctggtaaagtatggagaaaaatatgccagtaactacagtggcggcaacaaacgaaagctctccacagccatggctttgattggcggacctcctgtggtgtttctggatgaaccaaccacaggcatggaccctaaagcccggagattcttgtggaattgtgccctaagcattgtcaaggaggggagatctgtagtccttacatctcatagtatggaagaatgtgaagctctttgtacaaggatggccataatggtcaatggaaggttcaggtgccttggcagtgtccaacatctgaaaaacaggtttggagatggttatacaatagttgtacgaatagcaggctccaaccctgacctgaagcctgtccaggagttctttggacttgcgtttccgggaagtgtcctaaaagagaaacatcgaaacatgcttcagtaccagcttccatcctccttgtcatctctagccaggatattcagcatcctctcccagagcaaaaagcgactccacatagaagactactctgtctctcagacaacacttgaccaagtatttgtgaactttgccaaggaccaaagtgatgatgaccacttaaaggacctgtcactgcacaaaaaccagacagttgtggatgtggccgttctcacatcctttttgcaggatgagaaagtgaaagaaagttatgtatgaagaatcccgttcacacagggtgaatgaaaggaaggaagagcgaggtcttcctttgcactgtgtcaagtgttctagaagaaagcgtcctgcgtttctgtggagaagaacaaactggatactgtactgacactattcaatgcaatgcacttcaatgcaacgagaacacaattccattacaggggcagtgcctttgtagcctatgtcttgtatggctctctagtgaaaatgacttgaagttagttcattaccttatacagatgtgaaactctggtgtggaaccaagcagactctgggtttggattcatactttttttgttcctgtgtattctcactaggattgcaacaacagtctatcaaatagtcatggccagtgataatcaaagtcaaaggcacacacatcctcgtccattaagccattaagccatgctgaaccacaaaacaggtttcccggtgacacatccattgctggcaatgagtgtgccagagttactagtgccaagttgctcagaaagtctgaagcactgagtgtgtcacaaacacttttgtgaaaaccgccctactgtcggttgacatcattaaatatcaggtgacaaaaacggtgccacatgtgactaaatccccattttccttctctctttgatgagctgctgttgtggctgtcttgtacaaaatgtgcatctctctaacccaggtacttggttctcttgttcagtgttgcccatgcccctgtcatggcttgccatagcatctttctgagactttttcaaatacattagatcctcctaagcagcaaagattagcagccaaactgctggggctgcaagcggctcagttcagggtgtggcatgaaagatccagtgcatttacacgtggcaggtctgggttggtttgtgctgactgtctcctaacacaagatgggtacactacaccttgagatccttcattatttaacagaaatctagttctttctaactgtttgaattaacctagaaaatgaaagggtggcatttcattttgacaaaaatgtttgcattgttagtattatttggaattttaagttttatcaatgcttctggaagcttagaactgtacacgtgtgatgtcagtcacatagaggaatgtgcccggactgcctcatgcctttattttccttggtaaatttgaagatagaatgtctgactagcgcagtgaccagaaaacaatgtggtagtcaacatctcaggccatattttaagatcctgtagagcactattcatttcaggttgcagatggagtatttttgaaacatcattactatgtagatgcttggataggagtgagggggagctagcagatttcctgtgccatttattcagctgattgatgtacagatgtaggtttattttgtaaaatccactgaaagaatatggccacacccttgcctacttgatagcatcaatacagaagccaagaaggaccactaagtaaccccctcttcccagggagagcagctagcttgaaatctctcggatacaatcgatgcgtctgacctttgggatcctcaccatatgggcaaacaatgggctttgcaggatgagagacacccacttaaacctctgacgatctcgaatggttcatctcttccgtcattaaccagtcatggaaaacaatcaacaaactctgccacgtgaaatattttttcagacttttctaacccaagcttaatttgttttcatctgcaagcaacgtggaaaaaaatagttatttcaccagtgctcaatgtcatccgtcttcatacaaaacaaaaatatgagtaagttcctgtattgggcaaagttcaagtgagcttttgctatccttatttaacttcttctaaaaatttggaagaataagatttcagatctatttcaaattatgtttatataatgttatgtaattcattgcttgaaaggaaaaatgacaagtttgatactaatgtcaacataggtttctaaaatgataaggaaagtgtgtttccagtagttattggcataccattcattttagatatcaaagataccgaaatcaaagaagcatgtctttatttttcaaaaacaaacttccgttggctttctcagtccattatcaccatgtacagcccttagaaaaatccttgttttaattactcagatttttgaggccacaaaacaacaacaaaagtaaggcaccatttttgaaaacaaaatcaattgagtgtagatttaaaatcttttctgaagctagagacaatctgtagctattatgttaccttttacactatctgaagagcaatcttcaactttcctgtttaaacgtaattattttagaaagttaaaaatcaatcctatcttcaaataagaatttcttagattccctatggagatgtgcattgtgagttgagaaattctcaagtgcaaacacttctggtttactttaaaaaaaaatagtggaaaacttactaactgtgaatatgagaaagacaaaagaaagtgagtcctctcgctagatatacctagcataattcattatgaaacaaacaaacctcaaactactgtattttggtgtctgtaccgcaagcatatgcctcatgactataaatgttacatacatcatttgctctctgtatagtaggcattgacttaaagggattgtttgttgtcttctcatggttgtatatatcaggtaaaattgttccaaagagccatgtgttatgtaatggggaaccactttgatactgaattactaatttgtactttcattactatttgctggtaatagtgtaacgccacagtaatactgttctgattcaaaactgttgcatccctttttgtagaacatttatatttccataaggattcggtatgttcttttccctcctgccctaggatgaagctggttttgtgctttttctttatcattggccctcattccaagcactttatgctgtctgtaatggatctatttttgcactggaatatctgagatttgcaaaactagacaaaagtttcagagcagatttctaagttaaatcgttttcattaaaagaaaaaaaaactgaaaaaaattgtattgtgaataactttatatgacgtgtttttttaaaagcttgtttctatgttatgagtcacaaaataaagctgtgacagtcctgctggtct

SEQ ID NO: 312 - DNA, 1203 bp, Mus musculus
gaccacagcatcagcgccatgcctatgacactgggctattggaacacccgcggactgactcactccatccgcttgctcctggaatacacagattcaagctatgaggagaagagatatgtcatgggggatgcccccaactttgaccgaagccagtggctgagtgagaaattcaatcttggcctggattttcccaatctgccctacttaattgatgggtcacacaaggtcacccagagcaatgccatcctgcgctaccttggccggaagcacaacctgtgtggagagacagaggaggagaggatccgtgtggatactttggagaaccaagttatggacacccgcatacagctcatgatagtctgctgcagtcccgattttgagaagcagaagccagagttcttgaaggccatccctgagaaaatgaagctctactctgagttcctgggcaagaggccatggtttgcaggggacaaggtcacctatgtggatttccttgcttatgacattcttgaccagtatcgtatgtttgagcccaagtgcctggacgccttcccaaacctgagggacttcctggcccgcttcgagggcctcaagaagatctctgcctacatgaagagtagccgcttcctcccaagacctgtgtttactaagatagcccagtggggcactgattaggcccctgccatgctgtcactcagagtgggggacctgtccatactgcggatcctgcaggctctgggtggggacagcaccctggccttctgcactgtggctcccggttctctctccttcccgctcccttctgcagcttggtcagccccatctcctcatcctcaccccagtcaagcccatgcagcctttattctccccatttttttttcacatggccccttcttcattggtgcccagacccaacctcacagcccttttctgcaatctgaggtctgtcctgaactcaggctccctagagttaccccaatggtcaacactatcttagtgccagccctccctagagataccctgatggtcaatactatcttagtgacggccctccctagagttaccctgaaggtcaatactcgagtgccagcctgttcctgtttaaggagctgccccaggcctgtctcatgtacaataaagcctgaaacacacttgaaacacaataaacactgaacacttgctgtgaaaaaaaaaaaaaaaaaa

SEQ ID NO: 313 - DNA, 1350 bp, Mus musculus
gacttccgcttccggctctccaggcacgaggattcccgggagccaagcaagcggcaagatgaggcccttgactgaagaagagaccccggtcatgtttgagaagatcgcgaagtacatcggagagaaccttcaactcctagtggacagacccgacggcacgtactgtttccggctgcacaacgaccgagtgtactatgtgagtgagatgatgctgaagctggccgccaacatctccggagacaagctcgtgtcgctggggacgtgttttgggaagtttaccaagacccacaagttccgcttgcacgtgacagctctggattacctggccccctatgccaagtataaagtgtgggtaaagccgggagcagagcagtccttcttgtatggaaaccatgtgttgaaatccggtctgggtcgaattactgagaacacatctcagtaccagggagtggttgtctattccatggcggacattcctctgggttttggggtggcagcaaagtctacccaagactgccgaaaagtggaccccatggcaattgtggtgttccaccaagcagacattggggagtacgtacgccatgaagagacactgacttaggacggtcattccaagaacattttgctgtgtgagaggacttagctttgtttcctgtgtgcggccatcagattaaatctggacaacactgagatacgcaacttgggttcttatcaacagaaatggcgtgaaaacagggtctctggccctctagagtcaaaagcaggtggatcacaagtataaggccagctcaggctacttggagagttcaaggctagcctgggctacatagtgagccttgtctcaaaaatctaaaacagacaaaccagaacctgagagtgttttgtgtgagtaaatagagtgtttctgttttgtgtctgcgtcgtctttgtttggatcagaagacttgctctgagtgatggtttctaagttacttcactgaggacaggagccatcttactgttatctgtgataacactgttttccaggctcatgatagcacagtggactttctattgtgtgttaatgttaaaggtagaaacggccatatgagcctctggttttacatatggaatttaataaattttaatggttttatatttgttatttcatatgtgtgagtgttttgttggcatgtacgtatgtgcactgcttatgtgcctggtgcctaaggaagtcaaggtgatttcagacctggaactagagttactggttgtgagccaccgtataggtgccagaaattaaactcaggtcctctgcagggacagcagtggtcttaaccactaagctatcctaataaatttaataggtgc

SEQ ID NO: 314 - DNA, 2210 bp, Mus musculus
ggcgaacaagggcggtcggcagagcccagacgctgacagaagctgagcagtcggggcttcttggcaggtgatggcgcccctcgtagcctagaagtccagcaccctcggcaagccgcagacccacgcctctctcctttgtatctggtcaagtctccgggtcactttgaacatgttggtgcgactaaccaagctgtcctgccctgcgtatcactggtttcatgccttaaaaattaagaagtgcctacctctgtgtgctccaagatgttcttcaacctctgctgtacctcagattaccactcactacactgttcatccccgggagaaagacaaaagatgggaaggagtgaatatggagaggtttgcagaagaagcagatgtggtcatagttggtgccggcccagcaggactctctgcagctattcggctaaagcagctggctgctgaacaggggaaggacatccgtgtgtgtctggtggagaaagctgctcagatcggagcacacacgctctcaggggcttgtcttgatccagctgccttcaaagagctcttcccagactggaaggagaaaggggctccacttaatactcctgtaacagaagacaggtttgccattttaacagagaaacacagaattcctgtgccaattcttccaggtcttccgatgaacaatcatggcaattacatcgtacgcctaggacatctggtgagctggatgggagaacaggcagaggctcttggagtcgaagtgtatcctgggtatgctgctgctgaggtcctttatcatgaagatggtagtgtaaaaggaatcgccactaatgatgtaggcatacaaaaggatggtgcaccaaagacaacatttgagagaggactggaactgcatgccaaagtcacagtctttgcagagggttgccatggacacctagccaagcagctttataagaaatttgatctgagggccagctgtgatgcacagacttacggaattggtttgaaggagttatggattattgatgaaaagaagtggaaacctggaagagtagatcacactgttggttggcccttggacagacatacttatggaggctctttcctttaccacttaaatgaaggtgaacctctagtagctgttggctttgtggttggcctcgactatcagaatccgtacctgagtccattccgagagttccagaggtgtaagcatcatcccagcatccagccaaccctggaaggcgggaagaggatagcctacggagcccgagcgctcaatgaaggcggcttgcagtccataccaaaactcacttttcctggtggcttactaattggttgtagtcctggtttcatgaatgtccccaagatcaaaggtacccacacggcaatgaaaagtggaagtttggcagcagaatcaatttttaagcaactaactagtgaaaatctccagtcaaagacaacaggactccatgtaactgaatatgaggacaatttgaagcaatcctgggtatggaaagagctacacgctgttcgaaatataaggccatcttgccacgggatactgggagtatatggagggatgatttacactgggatattttactggatattgagaggaatggagccatggactctaaaacataaaggctcagactctgatcagctcaaaccagccaaggattgtacacccattgagtatccgaaacctgatggacagatcagttttgacctcttatcctctgtggctttgagtggtactaatcatgaacatgaccagccagcacatttaaccttaaaggatgacagcatacctgttaatagaaacctgtcaatatacgatgggcctgagcagcgattctgccctgcaggagtttatgaatttgttcctttggaacaaggtgatggatttcgattacagataaatgctcagaactgtgtgcactgtaaaacatgtgatatcaaagacccaagtcaaaatattaactgggtggtcccagaaggaggaggagggcctgcttacaatggcatgtaagacactaggccttcattcactggcacacctgacagccagtttccataaaactgtaaatgtatgccaaactaacttcctgtatgtttagataacttctgaacaagtgtccttcaaacattattgaagtaaaaaactttgtatctaaagttgccccataaaatcatgaagtatttgtcataaataaaacttt

SEQ ID NO: 315 - DNA, 3039 bp, Mus musculus
ggggcagcccagcggtttccccaaggaaggtcccagcccagatccaaggaacgagcatgcccagaatacctgagctctgagcgtagtgcggcccagcagcgtgcgtcggtttgaaagctcggctccaacccagcggacttcagaagcagcgggtggcgcagttccccgccccctcagccttgtccccgccccagaccctgaggcagcaactttacccagagggctctgtgtgcagtctgtgaagaccagcaagctttccggaccttggagcaggcccgccgcccacatgtctactctgctgatccatcatccccagtatgcctggctgcaagacctggggctccgcgaggataacgagggcgtgtataatggaagctggggcggccggggagaggtaattacgacctattgtcctgctaacaatgagccaatagcaagagtccgacaggccagcctgaaggactatgaagaaaccatcgggaaagccaagaaagcctggaacatctgggcagatattcctgccccaaaacgcggagaaatagtcagaaagattggcgatgccttccgggagaagatccaactactgggaagactggtgtctttggagatggggaaaatcctggtggaaggaataggcgaggttcaggagtacgtggacgtctgcgattatgctgctggcttgtcgaggatgatcgggggacccaccttgccttctgaaagacccggccatgctctcatcgaaatgtggaatcccttaggcttggtgggaatcatcactgccttcaatttccccgtggctgtgtttggctggaacaatgccatagctctgatcacagggaatgtctgcctttggaaaggagcaccgactacgtccctcgttagtgtggctgtcacaaagatcatagcccaggttttggaggacaacctgctgcccggtgccatttgttccctggtttgtggtggagcagatatcggcacaacgatggccagagatgagcgtgtgaacctgctgtccttcactgggagcactcaggtggggaaggaggtggccctcatggtgcaggagaggtttgggaaaagcttgttggagcttggaggaaacaatgccattattgctttcgaggacgcggacctcagcttggttgttccgtcagttctgtttgccgccgtgggaacagctgggcaaaggtgtaccactgtgaggagactgtttttgcacgaaagcatccataatgaagttgtggacagactgagaagtgcctactcacagatccgtgttgggaacccctgggaccccaatatcctctatggaccgctccataccaaacaggcagtgagcatgtttgtgagagccgtggaagaagccaagaaacaagggggcacagtggtctatgggggcaaggtcatggaccaccctggcaattacgtggaacccaccattgtgaccggtcttgcccatgatgcgcccattgttcaccaggagacttttgccccaatcctctatgtcttcaaattccaggatgaagaagaggtctttgaatggaacaatgaagtaaaacagggactttcaagtagtatctttaccaaagatttgggcagaatcttccgctggcttggacctaaaggttccgactgtggcatcgtgaacgtcaatattcctaccagcggggctgagattggtggtgcgtttggcggagagaagcacactggcggtggccgggagtctggcagcgacgcctggaagcagtacatgaggagatccacatgtaccatcaactacagcacgtccctccctctggctcagggaatcaagtttcagtgatactgcgtgggcttggcgtcccttagccattcctgtggctgctcggaagaagcctgaaaggaccctgacttgccccggataaatgatggctttgagtacggacagcagtgtctaatctccagtgattcccagacccctgtctaaatcaagatactcatttatcaaaagttcaaaattaaatattcacaacctagctgcatttagcaaaagataggtttggtgagtttttatgttactaattactttttttattacagctaatcatttcttagtgaagtacatgccatcataggaggttggggccatggaaaatgcaataggaaggaagaagtctttgcagtggagaaatgtcttctaagcagtgctgaatcctcatggtcccgtcctggcaggggttgaaggggagaggtacccccacatgctggggacctcagcacagtttcatgtgcatgatttgcagtgctccaaatgacaatgggccatttttgggtgaggtgaggaacttaacactgttgtgaatggttgctgggatgtgtcaacccctgggttcaaatctcagtaccaccacaacaaagataatgctctaaaaataatgctcacccagttaagactgctcctgactgtgtcagccagaaagaaatgtgcaggggtagacagaccttcgttcttgttccaaaccttgctgggaacttagggactgaagttgctcgtgaaagcacatctggatgcccgagtcacctcaggcttctgcagctgctcatgggtttctcctctgggaaggtcactgctgagaggctaaggtctcactgggaagctgtgctgggcccagcggtccctgctctcctgtggtgccgttgctctgtacttctgtgtagcagtcaccactgggcctgctcctgccacatcgggctcctggagaaacccttagggaataggacattgtaggcctcatgagtcgtcatggtgtggaaagatttggacaatagtaagaaatctgggggactgacagtgtggggaagaagcaggggggacactaatactaacatattaaataatatggtgatatacctttatataattaaatttgtagtagatttgactataaaaattaaaggggctgtgaatatagcttggttaggtaggctgcttgccactcaatgcctgggattccatctccagcactgcactaaattcatataaatacatgcatttaagtc

SEQ ID NO: 316 - DNA, 3728 bp, Mus musculus
ggccgcactgcaaggatgaggcttcctggttggttgtggctgagttctgccgtcctcgctgcctgccgagcggtggaggagcacaacctgactgaggggctggaggatgccagcgcccaggctgcctgccccgcgaggctggagggcagcgggaggtgcgaggggagccagtgccccttccagctcaccctgcccacgctgaccatccagctcccgcggcagcttggcagcatggaggaggtgctcaaagaagtgcggaccctcaaggaagcagtggacagtctgaagaaatcctgccaggactgtaagttgcaggctgacgaccatcgagatcccggcgggaatggagggaatggagcagagacagccgaggacagtagagtccaggaactggagagtcaggtgaacaagctgtcctcagagctgaagaatgcaaaggaccagatccaggggctgcaggggcgcctggagacgctccatctggtaaatatgaacaacattgagaactacgtggacaacaaagtggcaaatctaaccgttgtggtcaacagtttggatggcaagtgttccaagtgtcccagccaagaacacatgcagtcacagccggttcaacatctaatatacaaagattgttccgaccactacgtgctaggaaggagaagcagtggggcctacagagttacccctgatcacagaaacagcagctttgaggtctactgtgacatggagaccatgggtggaggctggacggtgctgcaggctcgccttgatggcagcaccaacttcaccagagagtggaaagactacaaagccggctttggaaaccttgaacgagaattttggttgggcaacgataaaattcatcttctgaccaagagtaaggaaatgattttgagaatagatcttgaagactttaatggtctcacactttatgccttgtatgatcagttttatgtggctaatgaatttctcaaataccgattacacatcggtaactacaatggcacggcaggggatgccttgcgtttcagtcgacactacaaccatgacctgaggtttttcacaaccccagacagagacaacgatcggtacccctctgggaactgtgggctctattacagctcaggctggtggtttgattcatgtctctctgccaacttaaatggcaaatattaccaccagaaatacaaaggtgtccgtaatgggattttctggggcacctggcctggtataaaccaggcacagccaggtggctacaagtcctccttcaaacaggccaagatgatgattaggcccaagaatttcaagccataaattgctagtgttcatctctctgggcactcactatctaagaggacgatgaattccttcagccctttaccatatgtctcagtttatattcctttcctatggctaaacatttcctttaaagctttacagcttttagaataaagctgaaaagatctaaaaagactcctatgttgctgttatatgaggaatgcttgaaagcactggaaatattgacaattatacattataattgcaaaacctttcatttttattagttgaaaagtttcctaatatttttattatttttataataaaaactaaattattcagcaagctagattctatatacgcaagttttattttcactagggctaaatatacacatttgagaatataccagtccttccaggtacaactgaaagccaagaactgtagtattatctttcgtctaagaagaacttaaagcattttagttctcaagaagaagggcagggatgggattgggggccagggacaatatgtatagctaaatgtattcatctaatgcaaaatatggcattaaaatacctaaaaatgtggtagcataatatatgtctcttccctctccaattgaaaaataatgttaccctgtagactttggtttagtggtaattcacttactgtttatagcctgttagaccgcgatacaaaagctgctttatcctctccctctgctctctgtgcacaatggtttgtgatgtaaggtgctagactactgtaaggtttccttggggaaaggcatggtaagggaaaacacactggtttatattttgaaagccaatcctaatcccaaagcaatactgttgtcgaggagtcaacgttctaggaagctgacttttctagaacaaatgtatttattaggatgaattttggaattttagtttaaatattatacattttaatcctaagcagtcaattgcttatttcattcttagaaattcaaagaatatatacaattttagccaaatgtgagtccctggaattccttacttgtggatgtcaagggtcacattaaaaggctctgggggcagtttcactcactttattcttgtgaaaaggggtcactcagagagaaacaaccagccgcacacttaaacgtgctcttgggtggaatctgaagtgccgcatgcagtcagtcacgtggagtaactgactgtacaacatgcactgtctaagcaataactttgatctttaagttttggtgtagcttctaatatactaaccaagcttttgaaatatatgcacaaagattccaccttagttatttttaaaacataactagggaggatatttattgtcttgactacttaaactttcaaacatgtagccactgtaaaaaaaaaaaaactttacaaagagcaagatactatttttgaaacatgcaacatgaagttttcaggtgaatacagtgacaactaagctattaataatataattaaattgccagcgtaagctaaatgcatgctgaattaaatgaccaaaatataacgtagattttaaagcctttacctacttggtaaaacagtgaatgtaagtggcagtaaccaatcttatttctttttgctttttaaaaaagactaagaagattttgatattatacaattcatgtgtttcaaatcctgtttattatatgtagccatataagtctaatgacatttccataatgaaaattgatttaccatagcaaaaatactatgtgttcatcctgagtgtgtctttctcagggtaacaatgaatccatgtaaatactttatccttggcacttccaatggatccaaatgttgttttctattatagtctatgatattcttctaactaattctttaacacagaaatttatttttgaatcattttctgtcactcatttaaaaatatattgtagactttgataatctctaatctgtttattgaaatagtccttagccttaacaattcactgatatatgctgatgttcattaatgtacactatttgccaatatgtatttttagagtcttggcttcatttgggtggctagcactgatcttaatgatcactttattgctgaacatcattattctttaaaaatgccaagtggaactaatttcttaggaatccagttgatttgcctgtcacgaaacgagaaagccatctctctgaaaagtagtaacgcagcaaatgtcctcagttctctggtggacagagctcgtgtgcgaggctcaaggagcattagaatcccaggatgggctggacctggatttttcagtagctgcccctcactcttcgataagttttcaagataggtggatatatgcaatttccatgaactcttgtttaagatttattttcattgatgtataattaaggttatgtttaatgtttctttaaagccttgtaaaataaaagttaatctttatatct

SEQ ID NO: 317 - DNA, 2447 bp, Mus musculus
gcactgtccgccagccggtggatgtgcggcaacaacatgtccgctccgatgcccgccgttgtgccggccgcccggaaggccaccgccgcggttattttccttcacggattgggagatacagggcatggatgggcagaagcctttgcaggtatcaaaagtccccacatcaaatacatctgtccacatgcccctgtgatgccagtcacattaaatatgaatatggctatgccttcttggtttgatatcgttggactttcaccagattcccaggaagatgaatctggaattaaacaggcagcagaaaccgtaaaagccttgatagatcaagaagtgaagaatggcattccttctaacaggattattttgggaggattttctcagggaggcgccttgtctttatacactgctctcaccacacagcagaaactggctggtgtcactgcactcagttgctggcttccacttcgggcttcgttttcacaggggccgatcaacagtgctaatcgagatatttccgttctccagtgccatggagattgtgaccctttagttcccctaatgtttggttctcttactgttgaaagactaaaagcattgataaatccagccaatgtaaccttcaaaatctatgaaggcatgatgcacagctcatgtcagcaggaaatgatggatgtcaagcacttcattgataagctcctacctccaattgattgacatcactaagaggccttgagtagaagttcaccagcatcacagtagtagagtataaacctcttcccatgactgaccatagaacttctaatgtgtgcagtgttaaaatgttttgcaaatacataccaatgatacagactaaatgatgttaccctcatgggaaatatatgatccttttaagtgtctatgcatatatttgtattatacaattcagaatatactaagtattacagtaggtaagtgaagcaactagattctttgtctcaaattcagcaaaataagataacaaacagttttattacatcatttgaaaattactagtatgttctgtgaagatgtgttcaggtaagatgtaagtgacttcttagttctgtgagttagactatagttttactccacaattgttcagtctccatgcagtgtctgtatttttctgtttgtattcacatagatgatactataatagctaagaatcagatggtattacattatccctaataatggggataatgcttttgagtgtcaaaaagtaatactgcattcttcaattaatggcccttctattgggagaccaggctttttttcccttctatgtaatttttctcaagaaaaaacaaggttcttttttgattttccgtagaaaactaatattgcctctctgtcatatattttattttgacattttgagatacagacatagccgggcgtggtggtgcatgcctttaatcccagcactcgggaggcagaggcaggcggatctctgtcaatagcctggtccacagagtgagttccaggacagccagggctacacagagaaaccctgtctcggaaacaaacaaacaaacaaaccgaaacacagacatacagtatttccaacctaggtaatatgaaaagaaatcaaacattacttaagtttatatatttcaaataactgcaccttagtccaactttagactgtagagttatagactctccagtcctggtaataaatctgtggttttatttttctgtaaaacacttaaaggggaagtaatatcttggcatatttagaaatacttgtgactggcttcaaaatataatttcttaaatatcttatagccgattttaagtttacattttctgtacatgttatgcttaaaaccaaatactgttcaagatgagcaatcagacttatgttttatttttatctgggtaacatattattttgaaattttcatcttaagtaaaggagcttttgataatcagtctcctgtacaaatattaaaataataatttgattttaaatcatcagcatgttcaaaatactggtgaaaattatttaatataaggactggttagaacattatatatatatcccatatttataactgttaccacacagttgaatatgttgcaaaaattatggttatttctgaacggttgcttttcttgctgttttccaaccaaccaagaagcacctttataaacaggtgctaattgatatgaagatcattttggtatgtcctagatagaatgaagccaaatgtctggatttaaaacaatttcaaacaatcatttactattttgctttactttaaagaacataaatttacttcagttattctatctgtaaagatttatttggtataagaaatattccattgactgtgtgctgtaatgtgggaaaatgtcatgtttttcacagtttctatcaatgtgaaataaaatttaattttggctttaaaaaaaaaaaaaaa

SEQ ID NO: 318 - DNA, 3987 bp, Mus musculus
tgtgcttgctgagtacgggagtgtctggcgtctctacctcctcatcatgagtgacttggattcttcgagctccagcgcctatccgaagtacctggagcacctctctggggatggcaaagctatcggtgtcctgaccagcggcggggatgcccaaggcatgaatgctgctgtccgcgctgtggtgcgcatgggaatctacacgggggccaaagtgtactttatatatgagggttaccaaggcttggtggatggaggctccaatattgtggaagccaaatgggactgtgtctccagcattctgcaagtgggtgggaccatcatcggtagtgcgcgctgcaaagcctttcgaagccgtgaagggcgcctgaaagctgcctgtaacttggcgcgcttgggcataaccaatctgtgcgtgatcggcggggacggaagtctcacgggagccaacctcttccgaaaggagtggagcggacttctggaagagctggctcggaatggtgatatcgataacgacacagtgcagaagtattcctacctcaacgtggtgggtatggtgggctccattgacaatgacttctgtggcacagacatgaccattggtacagattcagccctgcaccgaattattgaagttgttgatgccatcatgaccactgctcagagccaccagaggaccttcgtcctggaggtgatggggagacactgtggttacttggccttggtgagcgccttgacttgcggtgccgactgggtgttccttccggagtctccacctgaggaagattgggaggaaaatatgtgcctcaaactctcagagaaccgagcccgaaaaaagaggctgaatatcatcattgtgtctgaaggagcaatcgacatgcaaaataagccaatcacctctgagaaaatcaaggagcttgtagtgaagaatttgggatttgacacccgggtcaccatccttgggcatgtccaacgaggagggaccccatctgcatttgacaggattttggccagccgtatgggagtggaggctgtcattgccttgctggaagctacccccgagaccccagcctgtgtcgtgtcactaagaggaaaccaagcagtgcgcctgccactgatggagtgtgtgcaaatgacccaggatgtacagaaggcaatggatgaaagaagatttaaggaagccgtgaaactccgaggaaggcgttttgagggaaacctgaacacctataagcgtcttgccattaaactgcctgatgagaagattgtcaagagcaactgcaatgtagccgtcatcaatgtaggggcacctgctgccggaatgaatgcagccgtgcgctctgctgttcgagtcgggattgcagacggccacaagatgtttgcaatctatgacggctttgaaggattcgccaatggccaaatcaaagaaatcggctgggcagatgtcggaggctggactggacaaggagggtccattcttgggacaaaacgcaccctacctggaaagtacttggagaagatcgcagagcagatgcattcccatagtatcaatgcccttctgatcattggaggatttgaggcctacctaggactcctagagctggcagctgcccgggagaaacatgaggcgttctgtgtccccatggttatggttcctgctactgtctccaacaatgtgccgggttccgatttcagcatcggggcagacacagctctgaacactatcacagacacgtgcgaccgcattaaacagtcagccagtgggaccaagcgccgggtgttcatcattgagaccatgggtggatactgtggctacctggccaacatgggggcccttgcagcaggagctgatgctgcctacatctttgaagagccatttgatatcggagatttgcagtccaacgtcgtgcacttgacagagaaaatgaagaccagcatccagaggggcctcgtactcagaaacgaaagctgcagtgtaaattataccactgacttcatctaccagctctactcagaggagggcaaaggagtgtttgactgcaggaaaaacgtgctgggccatatgcagcaggggggagcaccgtctccattcgataggaactttggaaccaagatttctgccaaagcaatggagtggatctcggccaaactgaaggggtcccagggcacagggaaaaaatttgttagcgatgattccatttgtgtcctgggaatttgcaagagagatctcctgtttcaaccagtggcagagctgaagaaagtcactgactttgagcacaggatccccaaggagcagtggtggctgaaactgcggcccatcatgaagatcttggccaagtatgaggcgagctatgacatgtctgattcaggcaagctggagtccttgcagcaccatgaagaactatgagccatctcatcaagtctgccatcacctgacctggaatgttctccagggaccatccttttttgtaacatagttatttatcagcactttatggaagcaagcattgttgacggagtcagcagtaataatcagagagcaccacttgccatcaccactgatgcagcagaccctaagacatgaaacccagcctcacgctattgatcaggtgtcagttttctactgtatgggatactgtcttgtgctttaccatgtgtatgtcttgtgggattaaacatttggttacaactcccatggtacttggtttattgttttaagtaggagtctgaaacaagatgatttttttccatgccaccaaaggtttccttcctcagcagtcttgtggagattagcaaagtctccacagatactccagggacaccagggacatgtagataggggccccgcctacttcactactgcaagctaggcttatgatcttttccaatcagatcgcatacaaatgctaaaaggacaactatgaattagtgattctcaattcccccttagtcgtatacagcacagctgccaaggcttagaaggagaagctggtaccggcctcttcttcaaaagcagccagggtgctgggttttcaccctctggaagattttgactcactgtttagggttaatgattgggtccttggcaaaagcccatccactccgccctcctccgccccagactgatgagccgtctgcaggcaaagcatccctgcctcttgtaaggagtccgtgtgctcccactctgcctgagcgtcctctagcatccacacagcagggatgaggaaatgtttgcagagacagggatgcctaaaggtcactagagcttgaggataaataaaagaaacagacgctcagttttctccctgtctcagtaaacacaggacaaaagcctgaggtaacaaccacttaacaagcactcatggatgctcactgggcagctctgctaaactctgcatttacactctccttcaggcctgtggtgtgaccacacacacacacacactctctctctctctcctctctctctccactccttgtatttattctaaacgatctatttgttcttagtttttatgtgtatgaatgttttgcctacatgcatgtctgtgcaccaaatgcatgcagtggccatagagtcctgaagaggacatcagatccctggaacctgcagttacagatggctgtgagctgctgctagttggaagctaacaacccaaacctggtctcttgcaagagcagcaagtgcttttttgatttagcattttatttttttttttatttttttgatttagattttgatttgatttagccatttttcttaagtgaaggtctaaacattattgtcgtaaattattgtttgaaaataatgagtaaaactcagacaggttggagttggcttttatatttaaaatacatattctaggcttagtaatgtttcagaggcttaatttgctcactgctgtcatttaatgcatgattaatgatttcttcatggtctcagaatttccttcagagtttttgccagtcaataaacacctttggttggttttt

SEQ ID NO: 319 - DNA, 1889 bp, Mus musculus
ggaggcggcgcggggtggagaggagccggtgtccgcgcggccctttataacgcaccccgcgccgaccccggcagcctgggtacagccggtacccatcactcgctccctccgatcgctcctgtagcgtagccaacgcgccgccgctgaagccccgagacctcgcctccagcccttggacatggcgatcctcgtgcgcccgcgcctcctagcggctctcgcgcccacgtttctcggctgcctcctcctccaggtgaccgcgggtgcaggcattccagagaaagcgtttaatttaacttggatatcaactgatttcaagacaattttggagtggcaacccaaacccaccaactatacctacactgttcagataagcgatcgatctagaaactggaaaaacaagtgcttctcgaccacagacaccgagtgcgacctcacagacgagatcgtgaaggatgtgacctgggcctatgaagcaaaggtcctctctgtcccacggaggaactcagttcatggagacggagaccaacttgtgattcatggggaggagccaccatttacaaacgccccaaagtttttaccttaccgagacacaaacctcggacagccagtaattcagcagtttgaacaaaatggtagaaaactgaacgtggttgtaaaagactcgcttacattagtcagaaagaatggtacattcctcaccctgcggcaagtctttggcaaggacttgggttatataattacttatcggaaaggctcaagcacaggaaagaaaacaaacattacaaacaccaatgaattctcgattgatgtggaagaaggagtaagctactgcttttttgtacaagctatgattttctccaggaaaactaaccaaaatagcccaggaagcagtacagtgtgcacagagcaatggaagagtttcctgggagaaacactcatcattgtgggagcagtggtgctcctggccaccatctttatcatcctcctgtccatatctctgtgcaagcgcagaaagaaccgagcgggacagaaagggaagaacaccccgtcgcgcttggcatagaggaaaggctgaagccgctaacgctcacactgcctgcacggcactgttgcggagacctctgatgggaactgtgcaacatggagcatggagcctgccaatcctagctcagaggctgccttcatggcctgttactccagctaacgctttgattcgaacactagcatttgtcacgttaggacgaacggaaaccgtacaaactggttaacactacagcgccttttgcacaaatgctttagattgtatggtctacactcaggaagacactaggtcacccaggcaaagccagtggacagatgcctttcatataacctgggtgggcttttggaaaatctttgagaagttgatttcataggctgtagaacagtaaagtgggaactgggcggacttttctaacagtcgtacttttataaagcggtatttgggtgttttttccctcgaataggtacttttggaagttcaaagcaagtggcaaactttcatataaacatgttaaatgcaggatatttctgcttggggcatctttgtgatttgtactttcctacaatttagcactttaactgacaatgatggggtttaaacatttgacagccaactcttatttttatacgactactatacaaagaaactacatatagttttatgatttaaggtacttagaaatgtttatggttaacattgtatatatttacataaaatttaaaggttttgtatatgggattttctatttatatagcttctatttgtatattttgagataatttatttaatatacttttatataaataaaggtgattgggaattgaaaaaaaaaaaaaaaaaaaaaaaa

SEQ ID NO: 320 - DNA, 1645 bp, Mus musculus
gcttataaccctggatgcgcgcctctctcagccctgctccgccgtctgccactgccgcctgggctcactgagtggttcatctggccaggaaagcagactacacggactccagggacctgtacctataatccaagacaagatgtccagcaagggctctgtggttctggcctacagtggtggcctggacacctcctgcatcctcgtgtggctgaaggaacaaggctatgatgtcatcgcctacctggccaacattggccagaaggaagactttgaggaagccaggaagaaggcgctgaagcttggggccaaaaaggtgttcattgaggatgtgagcaaggaatttgtggaagagttcatctggcctgctgtccagtccagtgcactctacgaggaccgctatctcctgggcacctctctcgccaggccttgcatagctcgcagacaggtggagattgcccagcgtgaaggggccaagtatgtgtctcacggcgccacgggaaaggggaatgaccaggtccgctttgagctcacctgctactcactggcaccccagattaaggtcatcgctccctggaggatgcctgagttttacaaccggttcaagggccgaaatgatctgatggagtatgcaaagcaacacggaatccccatccctgtcacccccaagagcccctggagtatggatgaaaacctcatgcacatcagctatgaggctgggatcctggaaaaccccaagaatcaagcacctccgggtctctacacaaaaactcaggaccctgccaaagcacccaacagcccagatgtccttgagatagaattcaaaaaaggggtccctgtgaaggtgaccaacatcaaagatggcacaacccgcaccacatccctggaactcttcatgtacctgaacgaagttgcgggcaagcacggagtgggtcgcattgacatcgtggagaaccgcttcattggaatgaagtcccgaggtatctacgagaccccagcagggaccatcctttaccacgctcatttagacatagaggccttcacgatggatcgggaagtacgcaaaatcaagcagggcctgggcctcaaattcgcagagctcgtatacacaggtttctggcacagccctgaatgtgaatttgttcgccactgtatccagaagtcccaggagcgggtagaagggaaggtgcaggtgtctgtcttcaagggccaagtgtacatcctcggtcgggagtctccactttcactctacaatgaagagctggtgagcatgaacgtacagggcgactatgagcccatcgacgccactggcttcatcaatatcaactcgctcaggctgaaggagtaccatcgccttcagagcaaggtcactgccaaatagaccctgacaaagaggagcgggcctccccactctgcagctctcccaggcttcagcattaattgttgtgataaatttgtaattgtagcttgttctccaccacctgactggggctgctgtgtcccccccgcccccccacagcctttgttccctggtcccctatagcctacaaaagtggtcatcgaagggaagggagggtggcgggcagctgcagaaagcataaaatgacaattaaaagaagttacattagtctttaaaaaaaaaaaaaaa

SEQ ID NO: 321 - DNA, 545 bp, Mus musculus
gtggaacgccggggttgtgcttttaaaggcgctagctggtgcgctctgtgacttgattgctgctgcttctgagcttgctcccgcgctttcggcatccgtatcacctcaccagtatgtctcaggctgaatttgacaaagccgctgaggaggtgaagcgcctcaagactcagccaactgatgaagagatgctgttcatctacagtcacttcaaacaagctactgtgggcgatgtaaatacagatcggccggggctcttggacctcaagggcaaagccaagtgggactcgtggaacaagctgaaagggacttccaaggaaagtgccatgaagacctatgtggaaaaggtagacgagctaaagaagaaatacggaatataaatcaccagatttggtggccagccacacgtgtgacctgtgaggacataatgccttggttttttctaatgtagatgatatggctgtgatacattagggccagcgttaacctctgctcctcctccctctgtagtttttacctacaatcaattaaaagtacatttgttactc

SEQ ID NO: 322 - DNA, 1418 bp, Mus musculus
ggggcgacctcttcctgcgttctcacggctctttctgtttgtgagacctgtggctcgaccctgctgatagcaagatgtcttcaggaaatgcaaaaattgggtatcctgctcccaacttcaaagctacagctgttatgccagatggacaattcaaagatatcagcctaagtgaatacaaaggaaaatatgttgtgttcttcttttaccctcttgactttacttttgtgtgtcccacggagatcattgctttcagtgatagagccgatgaatttaagaaactcaactgccaagtgattggcgcttctgtggattctcacttctgtcatctggcatggattaacacacccaagaaacaaggaggattgggacccatgaacattcccttaatatcagatcccaagcgcaccattgctcaggattatggagtcttaaaggctgatgaaggtatctctttcaggggcctttttattattgatgataagggtatccttcgacagataacaataaacgatcttcccgttggccgctctgtggatgagattatacgactagtccaggccttccagttcactgacaaacatggtgaagtgtgtccagctggctggaaacctggcagtgataccatcaagcctgatgtcaataagagcaaagagtatttctctaagcagaagtgagcactggaccatttttctgccaggcagcattgagcagccagaagaaactcttgtactctactcgtgcttaaacacatgatgtggtgtgattccagataagcctttcctacagggctggggatggatagcctttcttccactattggtaatggtctgagctgtgttttgggcagaccaatcttctatcagtcacagaaaacaacctgttaattcttttttcttctttttttaagtatctattaaacgtgaattctgagaacttggtgattcattctttaaaggcaacattggaattttaaaaaggactttattttcatgagtaggtaaaagtgtttgagtgttgtttatcttttttaaaaagaatgtttccccagcatgtgtaccatttacctgcctgttggataccctgggaccatgtgggtgctgggaattgaacctgggtcttctataagagcaacggggttcctaaccattgagctgtctctccagtctcttaacttttgagacaggatctctcactgatctagaacttgatgtatatgtgaggctagtaagctctcaggatctacttttctagtgctggttttataagcatggattaccatagttggccttttgtttttcgagacagggtttctctgtgtaacagccctggctgtcctggaactctgtagactaggctggcctctgaaagatctacctgcctatttaatctgccaggaattaaaagtgtgtgccaccact

SEQ ID NO: 323 - DNA, 1725 bp, Mus musculus
ggaacggcctagggggcctgcggcgggctgcacgcagctgcgaggtgcttgctggggcggcgcgggggtctgcgggaacgcggctcgggcccagcagttctcagcagagccgccggcgccattgccttctcgctcggtgagcgccgctccgctcgcccagccgggcctccgccggccgccggcaccatgggccaatgcggcatcacctcctctaagaccgtgctggtcttcctcaacctcatcttctggggggcagctggcatcctctgctacgtgggagcctatgtcttcatcacctatgacgactatgaccacttcttcgaggatgtgtacacgctcttccctgccgtggtgatcatagctgtaggagccttgcttttcatcattggcctgatcggctgctgtgctacaatccgggagagccgctgtggacttgccacgtttgtcttcatcctgctcttggttttcgtcacagaagtggttgttgtggttttgggatacgtgtacagagcaaaggtggagaacgaggttgatcgcagcattcagaaagtgtataagacctacaacgggaccaactccgacgctgccagccgtgctattgactatgtgcagagacagttgcactgttgtcgaattcataactattcagactgggaaaatacagattggttcaaagaaacaaaaaaccagagtgtccctcttagctgctgcagagagactgccaaaagctgtaacggcagcctggccaacccctctgacctctacgccgagggctgtgaggctcttgttgtgaagaagctacaagaaatcttgatgcatgttatctgggcagcgttggcctttgcagctattcagctgctgggcatgctgtgcgcatgcatcgtgttgtgcagacggagtagagatcctgcctatgagctcctcatcactggcggaacctacgcgtagcggacagcacgtgcctgagctaatttgtagtatccttgttctgattcagaaggtgaattgagcaggcctgcagcagttggctcctgagttcatctagtcaaagcacacgtacactggtgttgactagcaggttggcatttcatgtacccaccttcctacctgcccctctggctttcttacccttgttctagatgattctccatgcccttaatttcagaaccatttacaagttctgtaatgtggtagagctataggagggtgtggcctgcttctgtcacctctgaggagtaatggactgtgttgtggtatcactgggcccttttcgtcttcataacgagaactcttggccaaaggtttgagggtaaagagggaggacgccagctgtctggtgccgcacaccagtgtccttttaaagaatatatactgtagtacaataatatagcaattgtacaaaatggctaacatagattttagaatcaaacagtatgtgtctttgttcatcttcaaaatcagagactgatctttgaaattagtggtttttaatcaaagctggctttataggaagactataatgtatgcactactgttttaaagcagttggtgtgagtgtgtgcgtttctctgtgtgattgaacccattcatcataagtcttacactcgttagagataatgtacccatggagactagcaaaatagtatgtagatgtgatctcaattgtaaatagaaaaatttaattcaataaactctgtatcagccctaaaaaaaaaaaaaaaaaaa

SEQ ID NO: 324 - DNA, 3125 bp, Mus musculus
agtgttcgcgggaacgctgcctcagcctcaacaccagccaacccagatcccgaggtgcgccagcgcccagcccagatctccacgcctgccaggagcgagcttcgccggctcgctgtccccctgagcagcctctgtccttctgtccaagtcccgcgcccttctcgggacccctgcccagcgggcagcactgtcaccctgccggccatggagaccccgtcacagcggcgcgccacccgcagtggggcgcaggccagctctaccccactgtcgcccactcggatcacccggctgcaggagaaggaggacctgcaggagctcaatgaccgcctggccgtgtacatcgatcgcgtgcgttccctggagaccgagaacgcggggctgcgccttcgcatcactgagtctgaagaggtggtcagccgagaggtgtccggcatcaaggcggcctacgaggccgagctgggggatgcccgcaagacccttgattctgtggccaaggagcgcgcccgcctccagctagagctgagcaaagtgcgtgaggagttcaaggagctgaaggctcgcaacaccaagaaggagggggacttgttggctgcgcaggcccggctcaaggacctcgaggctcttctcaactccaaggaagctgccctgagcactgctctcagtgagaagcgcacattggagggcgagctccatgacctgcgggggcaggtagccaagcttgaggcggccctgggagaggctaagaagcagcttcaggatgagatgctgaggcgagtggatgctgagaacaggctacagacgctgaaggaggagcttgacttccagaagaacatttacagcgaggaactgcgtgagaccaagcgccggcatgagacgcggcttgtggagatcgataacgggaagcagcgagagtttgagagccggctggcagatgccctgcaggagctgcgggctcagcatgaggaccaggtggaacagtataagaaggagctagaaaagacatactccgccaagctggataatgccaggcagtctgctgagaggaacagcaacctcgtgggggctgcccatgaggaactgcagcagtctcgaatccgcattgacagcctctcggcccagctcagccagctccaaaagcagttggcagccaaggaggcaaagctgcgtgacctggaggactcgctggcccgtgagcgcgataccagccggcgcctgctggctgagaaagagcgagagatggcggagatgcgggcgaggatgcagcagcagctggacgagtaccaggagctgctggacatcaagctggccctggacatggagatccatgcctatcgaaagctgctggagggcgaggaggagaggctgcgcctgtcccccagccctacctcgcagcgcagccgtggccgcgcctcctcccactcatcccagtctcagggtggaggcagcgtcaccaaaaagcgcaagctggagtcttccgagagccggagcagcttctcgcagcatgctcgcactagcgggcgtgtggcggtagaggaagtcgatgaagagggaaagttcgtgcggctgcgcaacaagtccaacgaggaccagtccatgggcaactggcagatcaggcgtcagaatggtgacgatcctttgatgacctatcgcttcccaccgaagttcaccctaaaggctgggcaggtggtgacgatctgggcttcaggagctggggccacccatagcccccctactgacttggtgtggaaggcgcagaacacctggggctgtgggagcagccttcgcaccgctctcatcaactccactggagaagaagtggccatgcgcaagctggtgcgctcactgaccatggttgaggacaatgaggatgacgacgaggatggagaagagctcctccatcaccaccgtggttcccactgcagcggctcgggggaccccgctgagtacaacctgcgctcacgcaccgtgctgtgcgggacgtgtgggcagcctgctgacaaggctgccggtggagcgggagcccaggtgggcggatccgtctcctctggctcttatgcctccagtgtcacagtcactcgaagcttccgcagtgtggggggcagtgggggtggcagcttcggggacaacctagtcacccgctcctacctcctgggcaactccagtccccggagccagagctcccagaactgcagcatcatgtaatctgggacctgccaggcagggctgggggcagaggccacctgctcccccctcaccacatgccacctcctgtctgctccttaggagagcaggcctgaagccaaagaaaaatttatcccctgcctttggtttttttttttccttctattttttttttctttttctaagagaagttattttctacagtggttttatactgaaggaaaaactcaagcaaaaaaaaaaaaaatctttatctcaatcctaagtccttcccctttctttccttgtatctgccttaaaaccaaagggcttctctaggagcccagggaaaggactgctttttatagagtctagatttttgtcctgctgccttggctttaccctcatcccaggaccctgtgacaatggtgcctgagaggcaggcatggagttctcttcaccagcctcctccaacagctggcccactgccacgccagctgcagagaaatggggcgcagagaggatgactgagaaggtcaagcccctccccggcactacacgaggccgaggctcctctgcctgccttaccttcttcctgcccttccctagcctggggcgagtggattcccagaggcaaatctgccgtgcttgctttttctatattttatttagacaagagatgggaatgacggggaaggagaagggaagatcagtttgagcccaccttttcccagcttctgagcctggtgggctctgtctcaatgatggagggcaatgtcaagtgggatacagggaagagtgggggacgaaggctcccagagatggggagaacctgctggggctggtgagaagtctagaggtgcggcgattggtggctacagcaaacactaaggaacccttcaccccatttcccatctgcacctctgctctcccctccaaatcaatacactagttgtttccatccc

SEQ ID NO: 325 - DNA, 2481 bp, Mus musculus
ccgtgaggaggcggcggccgggaagatggtgttgccgacagtgttaattctgctcctctcctgggcggcggggctgggaggtcagtatggaaatcctttaaataaatatattagacattatgaaggattatcttacaatgtggattcattacaccaaaaacaccagcgtgccaaacgagcagtctcacatgaggaccagtttttacttctagatttccatgctcatggaagacagttcaacctacgaatgaagagggacacttccctttttagtgatgaatttaaagtagaaacatcaaataaagtacttgattatgatacctctcatatttacactggacatatttatggtgaagaaggaagctttagtcatgggtctgtcattgatggaagatttgaaggtttcatcaagactcgtggtggcacgttttacattgagccagcagagagatacattaaagatcgaatcctgccatttcactctgtcatttatcatgaagatgatattaactatccccataaatacggcccacaggggggctgtgcagatcactccgtttttgaaaggatgaggaagtaccaaatgactggagtagaggaaggagcccgggcacatccagagaagcatgctgctagtagtggtcctgagctcctgaggaaaaaacgcacaactctggctgaaagaaatacttgtcagctctatatccagacagatcacctgttctttaaatactatggaacacgagaagctgtgattgctcagatatccagtcatgttaaagcaattgatacaatttaccagactacagacttctccggaatccgtaacatcagcttcatggtgaaacgcataagaatcaatacaacctctgatgaaaaagaccctacaaatcctttccgtttcccaaatattggtgtggagaagttcctggagttgaattctgagcagaatcatgatgactactgcctggcctatgtcttcacagaccgggattttgatgatggtgttcttggtctggcctgggttggagcaccttcaggaagctctgggggaatatgtgagaaaagcaagttgtattcagatggcaagaagaagtcattgaacacaggcatcattactgttcagaactatggctcccatgtgcctcccaaagtctctcatattacgtttgctcatgaagttggacataactttggatctccacatgattctggaacagagtgtactccaggagagtctaagaacttaggacaaaaagaaaatggcaattacatcatgtatgcaagagcaacatctggggacaaacttaacaacaacaaattttcactctgcagcattagaaacataagccaagtgcttgagaagaagaggaacaactgttttgttgaatctggccagcctatctgtggaaacgggatggtggaacaaggggaagagtgtgactgtggctacagtgaccagtgcaaagatgattgctgcttcgatgccaaccagccagaggggaagaaatgcaagctgaagcctgggaagcagtgcagtccgagtcaaggaccctgctgtacagcacagtgtgcattcaagtcaaagtctgaaaagtgccgggatgattctgactgtgcaaaggaagggatatgcaatggcttcacagccctttgcccagcatctgatcccaagcccaactttacagactgtaacaggcacacacaagtgtgcattaatgggcaatgtgcaggttctatttgtgaaaagtatgacttggaggagtgcacctgtgccagctctgatggcaaagataataaggaattatgccatgtttgctgcatgaagaaaatggctccatcaacttgtgccagtacaggctctttgcagtggagcaagcagttcagtggtcggactatcactctgcagccgggctctccatgtaatgacttcagaggctactgtgatgttttcatgcggtgcagattagtagatgctgatggccctctagctaggctgaaaaaagccatttttagtccacaactctatgaaaacattgctgagtggattgtggctcactggtgggcagtactgcttatgggaattgccctgatcatgttaatggctggatttatcaagatttgcagtgttcacactccaagtagtaatccaaagttgccgcctcctaaaccacttccaggcactttaaagaggaggagaccgccacagcccattcagcagcccccgcgtcagaggccccgagagagttatcaaatgggacacatgcgacgctaatgcagcttttgccttggttcttcctagtgcctacagtgggaaaacttcactccaaagagaaacctgttaagtcatcatctgcaaatgatacccttacagttaatagttgaagaaaaaatggcaagagatcatgtcctcagatcaggtggaattactcaaaatttaaagcctgaaaattccaattttgggggtgggggtgggatggg

SEQ ID NO: 326 - DNA, 4591 bp, Mus musculus
ggagtcgggtgaggacggggcgtgcccgggtgcgcgcgcgcccgcccgcctccccgcgcgcctccctcggctgctcgcgccggcccgcgctgcgcgtcatgccgcccaaagccccgcgcagagccgcggccgccgagcccccgccaccgccgccgccgccgcctcgggaggacgaccccgcgcaggacagcggccccgaagagctgcccctggccaggcttgagtttgaagaaattgaagaacccgaatttattgcattatgtcaaaagttaaaggtacccgatcatgtcagagaaagagcttggctaacttgggagaaagtttcatccgtggatggaatcctggaaggatatattcaaaagaagaaggaactctggggcatctgcatctttatcgcagcagttgatctagatgagatgccattcacttttactgagctacagaaaagcatagaaaccagtgtctataaattctttgacttattaaaagaaatcgataccagtaccaaggttgataatgctatgtcaagactattgaagaagtataatgtgttatgtgcactctacagcaaattagaacggacgtgtgaacttatatatttgacacaacccagcagtgcgttatctactgaaataaattctatgttggtgctaaaaatttcttggatcacttttttactagctaaaggagaagtattacagatggaagatgacctggtaatctcatttcagctaatgttgtgtgtagttgactattttattaagttctcacctcctgcactactcagagagccatacaaaacagctgcaatccccattaatggttcacctcgaacacccagaagaggtcagaacaggagcgctcggatagcaaaacaactagaaaatgatacgaggattatcgaggttctctgtaaagaacacgagtgtaatatagatgaggtgaaaaatgtttatttcaaaaattttatcccttttataaattcacttggaattgtatcatctaatggacttccagaggttgaaagtctttctaaacgctatgaagaagtttatcttaaaaacaaagatttagatgcaagactgtttttggatcatgataaaacacttcagactgatcctatagacagttttgaaacagagagaacgccacgaaaaaacaaccctgatgaagaggcaaacgtggttactccacacactccagttaggactgttatgaatactattcaacaattaatggtgattttaaattctgcaagtgatcagccatcagaaaatctgatttcctacttcaataattgcacagtgaatccaaaagaaaatatcctaaagagagtaaaggatgttgggcacatctttaaagagaagtttgctaacgctgtgggccagggctgtgttgacatcggagtacagcgatataaacttggagtccgattgtattaccgtgtgatggaatccatgcttaaatcagaagaagaacgtttgtccattcagaattttagcaaactcctaaatgacaacatctttcatatgtctttactggcctgtgctcttgaagttgtaatggctacgtatagcagaagtacattgcagcatcttgattctggaacagatttgtccttcccgtggattctgaacgtacttaatttaaaagcctttgatttttacaaagtgattgaaagttttatcaaagtggaagccaacttgacaagagaaatgataaaacatttagaaagatgtgagcatcgaatcatggaatcccttgcatggctttcagattcacctttatttgatctcattaagcagtccaaggatggagaaggacctgataaccttgaacctgcttgtcctctcagcctgcctctccagggtaaccatactgcagcagatatgtatctttctcctctaagatctccaaagaaaagaacttccactacacgtgtaaattctgctgcaaatacagagacacaagcagcctcagccttccatactcagaagccattgaaatctacctcccttgccctgttttacaaaaaagtgtaccgtctagcatatctccgactaaatacactctgtgcacgccttctgtctgaccacccagagctagagcacatcatctggactctgtttcagcatacattgcaaaatgagtatgagctcatgagagaccgacatttggaccagattatgatgtgctctatgtatggcatctgcaaggtgaagaacatcgacctcaagttcaaaatcatcgtcactgcctacaaggatcttcctcacgctgcccaggagacctttaaacgtgttttgatcagagaagaggagtttgattccattatagtattctataactccgttttcatgcagagactaaaaacaaatattttacagtatgcctccaccaggcctcctaccttgtcaccaatacctcacattcctcgaagcccttacaagttttctagttcacccttacggattcctggaggtaacatctatatatcacccctaaagagtccttataaaatttcagaaggtctgccaacacccacaaaaatgactccgagatcaagaatcttggtctcaattggtgaatcatttgggacatctgagaagttccagaaaataaaccagatggtgtgtaatagtgacagagtgctcaaaagaagtgctgaaggcggcaacccccccaaaccactgaaaaacgtgcgctttgacatcgagggagccgatgaagcagatgggagtaaacatctcccagcggagtccaaattccaacagaaactggcagaaatgacttccactcgaacacgaatgcaaaagcagagaatgaatgagagcaaggatgtctcaaacaaggaggaaaagtgaggacctcagggccctggaccctcagccctggggacaccagactcctggctcatggttgtgactagttcccaggttctgctcatgttagagatataaaatgtgcaggtacaagctgaatatttgtgtgggtgattcgtaagccacttcaatgttgtaatcaatggtagagaattgatagcacacaggattgagaatcttgtgcagatcatgccatttaaaatatgacagcaagttgtttgcatttccaacatgagcctgctgccctcagaagtgagggcctctgcaggggtcctgaccccctacatctggctgactactttgcctttcctcatggcacatgtgtgatgtttgctcttggttttattaatttatatgtatttttttaatttaacgtgaatacccttagaaaatgtgtcttgtcttccaaatgcaagttgattgactgtccacattcaaccaaattatcttgaatcttctactgaaacagattgttacaaactgggaaaaagtactaatttctacacattggactattttaatattagaatctaatgtgccgtgtgtttgtttcacatattttacttttgaaatacaagcaaaaaaagtataatcatatgatactgtcttactactgacacagatttcatacctcagaccctctaagaaccgattcttttattcacccaacacatgctttgaactgaagactattgataatactccaaggttgtttttttctttcaatcattcagatcactgaatttataagtacccatgtagtacttgaaagtcaagtttggccacaactgtgcttaagaggaccctagtacagtacaacccaagtgcactttttaatgtttctgggtcctgaagaatcaagatacaaattaattgtgatttacaagcagactgttaactatagaagccttcagtttttttccctcatagacgtgtctaattacatctcaacagtttactctgttcttctacatctggggatgtttgtgttctctctggaatggtacatcttccagggtcttttgaacttgcagttatctattttttaagccaatctggtctaataactctggcttcttcaaagccacaccatttctagtccagctgtgcagaaacttcagatgaaaacagctgcattgaaaatagaggcactcccttcaccccccacctaaaggtgtatttaaattatcttgtgggattaacttatttagagatggtttaatttaaaataggggatatttaaggtagcatcagctagcatttaagaaaatcactttttctaaactccatactttttgaaaagaaatctggtcttgttaggaaacaaatttctattttgtcctcaatttagtttcagttttactagtttgatagttatctcaataacaaaagcaatagacagcttcccccatttcttcattaagttttgcatgatcatcacacagattagttaggttttaggtcaagggcttaccatacttctaggtcttttgctagtgagttcaagttagaattagtgacagaatcataggaattttcagagatcctgcttcgagatttcttaaagctgcagacactgcactattggttttgtttttttgtaccggttgaaactatacattcaaattgctatgttcctattttctataatagtttgtctattttaaaataaactagttgttcagagccttaaaaaaaaaaaaaaaaaa

SEQ ID NO: 327 - DNA, 2841 bp, Mus musculus
cagcttttctcccggacgcctgggctgaagacacaatgtcgggctcctcccgccgactgctctgggccgccacctgcctcgccgtgctctgcgtctcggccgcgcagcccaacatcaccaccctggctcccaacgtgaccgaggtgccgaccacgaccaccaaagtggtcccgacgacgcaaatgcccaccgtgctaccagaaacctgtgcgagcttcaacagctgtgtttcctgtgttaatgccacctttactaataatattacctgcttttggttacattgccaagaagcaaataagacctattgtgcaaatgaaccattaagtaattgttcccaggtgaaccgcactgacttgtgttctgtaatacctcctaccactccagtgccaaccaattctacagctaagcccacaactcggccttcctctcctacacctactccctcagttgtcacatcagcagggacaacaaataccacactgactccaacctcccagcctgagcggaagtcgacctttgatgcagccagcttcattggagggatcgtccttgtcttgggtgtgcaggctgtaattttctttctctataagttctgcaaatctaaagaacgaaattaccatactctgtaaacagacctgttaaattaatgtggactggcagttaacttgtgcaactcactgaaaccaaaatattgaagaagtcccacatggaagacgctgttccaggatctttacctttccaaaggatgcatacaggatattttggagcatcatcctcgaagaaaagtcagttaaaccatttagttcatcaggaatatttaaaatattctgcatgaatccgtgtggctgtcgtctttgtttaccatggctgctgctgtgggactgttttttcctctgacatgccaaatgtaacttctgtaagtggtggagagtgctgtcctgtgtaggcagcttctgactgcagttgaaatgtagtcccctagaatcctaaaggctgttattctcatcctagttccaggtgtaacttggtggccagaattgagaagagtgccaaatgaccacccgtcaggcagattgagggccatcacttcaaacatagattaaatttgtttagcactaaactatccctagagtaaatttttatgcttgacaagttgtattttatatattagaaataagatgccacacagggcaatccagatttagattaaagaaaggatacacagacattaatctgcaacaggtcttgttcatactcataaagtgtaccgtattaagaaatcagaacagtgccttaagacagactgagacgtcgtgaaaaatgtgttcacactgtgggaggcaaagcttggtctgagaatgtaactgttgatgtgagcagcagaaatctgcttatagataacatactgttaatatttaattaaaagcattgttttttctagagctgagaaatagaagctaaagaataattagagctgaaaggcttccttatatcaaaccatctaacatttttcttagggctgttaaactagacataaaattgatttatctttctctctgtacacaaagtatccaaatattataccttaacgattcctaccaggttttcttgaaaagtggcttttacatgaggcaagaaggaagtagttgtagatagaatcattttctagttctttaaatgagacaatcactttgttttctaatagatgtgacctgtgtaacttaaaaaatctgagggtttgagagaggttgctctagatttccaatgacgataccctggctgaataggcttttctcttccttgggcctttacttcttttcttcctccttggtttcagttcccatgtgctatcattataatcatgcagacttttacttcagttgcttctgaaagcactaagttttcagttttggagttacttctcccttgcctctgacacactgcacacgtctagaggctgtaattggaaataggcttttggtgtcctgtgccattcaagttgtggggctttcatttggttacagagttcagcgcttggttcccagggtttatatacgaaacagcggattgctgtgggctggttcataaagtgaaactaatgaatctatctctttgtcacttgctggtacagctagtttgtttcacttgcacatttgtacatatatctaatgttttcaagtgccttacttgtttaaactctgacttcaaaggtttttggggaaagataggtttacctcacagttatgtttccattgtaatttctaggttccctcacaaaaatctatttcagtgctgtagctgttagttttaagtgagtgctaaagttcttttaaaagtacacagaatttccatcccttataaaggtggcaaaattggtttgtcatttacctccatgtgactccttgccccatataaatgtcagcatatgtagcaagttttctaagaatgtaacttaatttgaagctcctgaaattttgagcactgctctaacattgtaggaagttagtgacattttgcaagtctctacaaaagctctcgccacagaattcactgctgccctgactcttcaccatctttctttagcaaggtattttgagccttaatgattttgggttttttaatcccgaaggtatataaaagccttttcagagttttcatctgatttgtcctgaggatctagttctatcaaataccttattttacctttgccatacttgctgcacaagcagacactgctggacttagaagtttctatttgagttccttaaactacaaaactaatatgtatgtgtaccaaactgatttaaaataaatgtttattagtctcttgaaaaaaaaaaa

SEQ ID NO: 328 - DNA, 3352 bp, Mus musculus
ggaaggagcgctgccagccggaacagtgagcagaatgaacacatccctggaacagagtggctgctacagtaatagagaaactcttctgaggtgcagtgatgcaaggagggagctggagcttgctattggtggagtacttcgggctgaacagcaaattaaagataatttacgagaggtaaaagctcagattcacagctgcataagtcgccacctggaatgccttcggagccgagaggtgtggctcaatgaacaggtcgatctcatctatcagcttaaagaggagacactgcagcagcaggctcagcagctctattggctaatgggccaattcaattgtcttattcatcaactggagtatactcagaacaaagatcttgccaatcaagtctctgtgtgcttggagagactgggcagtttggccctgaagcctgaagattcaactgtcctactctttgaagcagatacatctgctctgcgccagaccatcaccacatttggatcccttaagaccattcaaatccctgagcatctgatggctcacgcgagctcctcaagtattgggcctttcctagagaaaagaggctatatccaggtgccagagcagaagtcagcatccagtggcacagctgtatctctgagtgagtggcttcttgtaagcaaacctgccattggtcttcaggctccttatgtacccagtaccaacccacaggactggcttatcccaaaacagacttcagagaatagtcagacttctgccagagcctgcagtttcttcagcgatgcctggggcaatctgaagggcttagaaaattggctccttaacagtcatcaacaagaaattgctggaaaaccaagttcctcaaaatgtaacagccattgtagcaccagttctttctctcctgaagctgaaaaggctgaagatgtagagctccttgatcaagacgagctggacctgtctgattggttggtgactcctcaggaaccctgtgagctggagaagcctgtggatggcagctgggaaaccagcgagaagtttaaactcttgttccaggtgttcagagagccctacaatgtgagtgattggcttgtcaagcctgactcctgtaccaactgtcagggcaaccagcctagaggtgtggagattgagaacctgggcaatctgaaatgcctaaatgaccacttggaggccaaaaaatcagtgtcggtccccggcgcaacaatcagcgacggctggcttgcccagaaccatcaggacacatggaaagtagaggaagtgtgtaaagccaacgagccctgcaccagttttgcagagtgtgtgtgtgatgacaactgtgagaaggaagccatgtataaatggcttctgaagaagggaggaaaggacaagaatggaatgcctatggaacctaaatctgagcctgagaaacacagagagtccctgacactgtggctctgcccttccagaaatgagctaacagaacaagctaaggcacccaaggctatggctcctgctagaattgctgattccttccacgtcataaagaatagttccttgtcagagtggcttatggggcctacgtgcaaaggaggccctaaggacgtgcctaatacagaggagagagctggcaaagagatgcttcaaagctccatggccacttcctggtgtccctttaacactgccgactgggttttaccaggaaagaaagtgggaagcctcagccagttcccctctggagaagataagtggctacttcgaaagaaggcacaggaagcatttcttaattcacccctacaagaagaacgtaactttcgccccgactgttacggcctcccagcagtttgtgatctctttgcctgtatgcagcttaaggttgataaagaaaaatggctgtacagaactcctctacagatgtgaaggaacagactaccagaatcgagcagctttcctgcagattattgcacatccttgagctgagtgactgcgatttgccaaaccattgtgcattccaagcctgactagtcagcttagttcctctcctgcttagttttgaactagtaaacagaagtcataaactatgagttaagtctgtgaaagaggcttcaagtggaggtgattcattcttttgaaagccgtaacgtgcgtaacttgatcaactcccgtactagaaaccacatcccggtacacaggcctttaccagcttttctacagccaacactagttttaaaagtgaaatattcctatatcaagtgtgttaatgtgttcaaggtaataagttctctaacatttgtcttttagctgtttctcattacaggcttctagagatttgaaaattttttttgttcagttgatatatagaatatttcacacaaatagttaaccttgccaatacagtatatttttccctactaaatgtctattagttatattgcaaattttgatactcatcagatatttagcctacataccatttctaacatttctcatttggaagaaattaagctattatagttgttgcctttatttctttccagtatccagtgagctctttgaaagggactttgttttaagaccactcttagggcagtcagagctcttaaagtcctacaaacctcggctttaactaaagtgaaccctaaagcagaaaggtaaaaagtgttaggaatgcagtacccgaaccactggtcatcctaaggatttcttggtgcatcctgtgtaaatggaagctgagcttgacacctggtgctcttaactagggataaagtcaatgtcctgttacttcaagcacagcatcctgaacctcctaaagtacagtgcagtgacatcttgattaccaggctgtgctcaacactgtgccttggagtgtctcaccgagacttcacagaactgatatccttgagttctgtattctagaaagcttctctaaggatttatcttttacagttcccaaggataaattagttgctttctattctttgaactattaatattaagcctctgaaatgcctatgctattggaagtacttttgggaaaattttatggtcccatagtgacattaccatacagctttactgaagctccaaatcatagctgaaaagaacctcatattttcttatgtccctcaagatgccactgagtattataaagttggtaggtaaagacaatttaaggagcctttccaacattttaggttgcagggaactttgtagtttcttttttgaggtctaacactgtattcacattattaaaacataatttaagttaatcacttgctaatgatatataaaactttcttttgcattaagttttaaatctccattaaaagcataatggacacatcaaaaaaaaaaaaaaaa

SEQ ID NO: 329 - DNA, 3460 bp, Mus musculus
ggcggacccgcggtcagtctgcagctgcgggaggccatggggcgcttcgccgctgcattggtgggctcactgttctggctggggctgctgctatgtggtctgggcagtctggcgagcgccgagccccgggccccgccgaacaggatcgcaatagtcggtgctggaatcggtggtacttcctccgcctattatctaaggaagaaatttgggaaggacgtgaagattgacgtgtttgagagagaagaggtcgggggccgtttggccactttgaaggtgcaaggtcatgactacgaggcagggggttcagtcattcaccccctaaatttgcacatgaagcgatttgtcaaagagctgggtctctccagtgttcccgcttcaggtggcctggtgggcgtgtacaatggaaagtctctggtgtttgaggagagcagctggtttgtaatcaacgtgattaagctggtgtggcgctatgggtttcagtccctcagaatgcacatgtgggtagaagacttgttggacaagttcatgaggatctaccgttaccagtcccatgactatgcctttagcagtgtagaaaagttgatgcacgccatcggaggggatgactacgtcagactgcttaaccaaactctccgtgaaaacctgaagaaagcaggcttctccgagacgtttctcaacgagatgattgctcctgtcatgaaggtcaattatggccagagcacagacatcaacgcctttgtgggggcggtgtcattgacggctgccgattccaacctctgggcagtggaaggtggtaataaaattgtttgctcggggctccttcaggcctctagcagcaatcttatatctggctccgtaatgtcaatagaggagaagacgaggaccaaacagacaggaaaccccaccaagatgtatgaagtggtatataaaacaggatctgagacccattctgacttctatgacattgtcctcgtggctgctcctttgaaccggaagatgtccaacataactttccgaaattttgatccgcccatcgaggaattcaatgacccatatcaacagctggtgacaactttcatcaaaggagaactcaattccactctcttcagctccagacccaaggatcagtttggcctctcggcaattcttgtcactgatgactccgatatgtttattaacagtctgtccattgtggcctctgtaagacagaaggagggtcccccacccgcggtggatggcatgcacgtgtggaagaccttctccagggacatcctcaccaaagaacaaatttcaaagctcttcctgtcctatgattatgctgtgcggaagccatggctgtcctatcctcactatgagcctcctcagaaatgtccctccatcatcctccacgaccggctctattacctcaatggcatcgagtttgcggccagctgcatggaaatgagcgccattgccggctacaacgcagctctcctcgcctaccaccgctggaacggcaatgaggacatgattgatcaggacgacctgtatgaaaggcttaagacggagctgtaactgagcactgcccctcccccgagcgtcctgctctcgaaggaccgagtcagcagagaggaatttgaacctttcctggtactcctcatgtgggtcatgagaaaacacagcgttcctgttcctcggagaatgtgttcttctgtcagaatgtcatcactctggatttgggggcggtacaggaggattgaacctgaggccccgtgcatgctgggcaagtgttcccctcttgagctgagctatatccctagccctcctttgtggtttttcttttgagactgggtctcactaagttgtccaggtggaatcctcctgcctcagtctccggagagcctgggatttgattccaggccctccacatgaggcgtggctggataactggggaaacattggattttcccaggcttgtctggttttaagagtcacctggaacttcataaacatctgggttaggtcattgggctggtgtgggcctgggtttgtttagattgtaatcttttcttgtctctcttttcttctttgggggatgttacaactagggtcttagtctgcaccccaggctggaactcattatgcagcccaggctggtcttgaaatcacagcaatcctcctgtctcagcctcctatgtgctggaatacagatgtttcccagttcctggcagtttatactcttttgatgagaatgttctcaaagcctgaagtcctgactttaagaatgtgacttttgattgcttctgcctcggctttatcagggatagattcagagatagaagcagagatagcctgtgatttggaaccaaatatataaactattaacttgagaaactatttaatatataaactattaacttgaggaggtctgtttttctatactgtggggattgaacccaggaccccgagtatcccagacaaatgctctaccactgagctacattgccagcctcaagagcttcaggatcgacatccagagaatggaatttcctaggttgaagatggggtcttggctctaaagctttgtcaagatcaagttcctcgcatgcagccaagggtgagcaggtcctgggtgtcagatagagagctttgagtgccttaaaagtgctaagcaacacaaatcaaaaccacagcagaccggtgccagaggtgactggctgctcgatggttaatcagctgtggtctccaagggaacgaacactagagcagaggcggcctgagtgagcccagagcagttggccttagaaccaggtcttcatggctgcgtgagttcagagggacgcgtatcagatgctgggcatgcgcagtgaggggccgttgctgaaatcttaatacagtggcgctcagttgtagctgcacatgggagtcagatttctcttacgtagacaagctcaagaaatctggtgtttagtccactgctcataggtctccagtgactatcatagccactagtattaagagggaaaaaaagtaattttgcctgctttggtggtacttgcctgtcatccatacctttgtgacaaagcgagaggatcaaaagttcagagccagcctgggctgtggcaacaccctatctcaaggaataaaaatcaaaactcttcaccaggttatagcgttgcttcaataaagcggtcttaaaaagcctgattcttaaaaattatttttccctactctagctgtaggaattaataatgtgtggagaaagcagcggtgatatatttgatatggtgacagaaattaaattcatagtttaatcagaaggttggctttttttctaattcatttagagacatttgtatttttttctgctgtggtgttaaggaatgtggtttgtcaaaaacacaacactcagaaatatagcactctcgtggaaaaaaaaaaaaaaaaaaaaaaaaaaaaaaaaaaaaaaaaaaaaaaaaaa

SEQ ID NO: 330 - DNA, 1748 bp, Mus musculus
gccgtgtgtgaggcggcggaggtcacggcgcggaggcggggcgggggacagcatggcagcctccttggggttccggggagcagcctccggcctctggtactggagcggccggcggcggcccgtgggcagccttgcagcggtgtgttctaggtcaatggcttctaagactccagttggattcattggactgggaaacatgggaaatccaatggcaaaaaatctcatgaaacatggctatccactcatcctctatgacgtgttccctgatgtatgcaaggagtttaaagaggctggggaacaggtagcatcctccccagcagaagtagccgaaaaggctgacaggattatcacaatgctgccctccagtatgaatgcggtagaagtttattctggagcaaacgggattctaaaaaaagtgaagaaaggctcattattaatagattccagtactattgatccttcagtttcaaaagaattggcaaaagaagttgagaaaatgggagctgttttcatggacgcccctgtctccggtggtgtaggagctgctcggtctggaaaccttacatttatggtgggaggagttgaagatgagtttgctgctgcccaagagttgctggaatgcatgggctccaacgtggtatactgtggagctgttggaacggggcagtctgcaaagatctgcaacaacatgctgttggctataagtatgattggaaccgctgaagctatgaaccttggaatcaggtcaggccttgacccaaaactattggctaaaatcctgaatatgagctccggacgatgctggtccagcgacacttacaaccccgtacccggggttatgcatggggtcccctcatccaataactaccaaggtggatttggaacaacactaatggctaaggatctgggattggctcaagactctgccaccagcaccaagaccccaattctcctaggaagcctggcccatcagatatacaggatgatgtgttcaaagggctactcaaagaaagacttctcatctgtgttccagtatctacgggaggaggagcccttctgactgcgccctgaggacgtggacgctgttaggaaccaaactctgtcctgagcttcctctagctcactctagaagtaatggtctaatcaaaggtcgtctgtctgcttttgattgtctacatcacagcaatccctgggaatttctatccattttaaatgctgccgctttcatctgtttagccagcacacccaatggtttcactaactagcccagttgacctttttgaagtttgagccttgagcaccttcaacaaaattgagcactctgattaggatatccactttgcaaataaaaccaaatgttttgtcaacatgatggtaaaaaggaaagaaatctgttacaaagacaaattagagggaaatttgtcctgttaaccacatgctattattccttcattcagggttactgacctactgtccagggcttgataggtaaggcagcttgttggcccttgttacagtatcttagtgtaccctcctgttacagcttccacactcagccggcttgcttcagtatttttgcttcctgtatattcttatacatgtttttgactccagaaaaatgacacctttagactgtttcagagccaatgatgatatttcctttaaataattattacattattctaactatagtcatattattttggatttaaataaatttctatcctgataacaaaaaaaaaaaaaaa

SEQ ID NO: 331 - DNA, 2879 bp, Mus musculus
gaagagccaagcggccagcccagctctgcccagcgcagccagcccagagcccagccccgcgcacgtgcccgccagacctgcaaacttgtgccaccggctatcctgcgtccccggggagcccaatcgcccggagcccgcacccctcccgtcagtctccaaccatgggttgcttcgaatgctgcatcaagtgtctgggaggagttccctatgcctccctggtggccaccatcctatgtttctctggagtggccttgttctgtggctgtgggcatgtggctcttgcaggcaccgtggcaattcttgagcaacacttctccaccaacaccagtgaccatgccttgctgagtgaagtgatccaactgatgcagtatgttatctatggaatcgcctcctttttcttcctgtatggcatcattcttctggcagaaggcttctacaccacaagtgcagtgaaagagctgcacggtgagtttaaaacaactgcctgtggccgatgcatcagtggaatgttcgtgttcctcacctatgtgctgggagtggcctggctgggtgtgttcggcttttccgcagtgccagtgtttatgttctacaacatctggtcaacctgtgaagtcatcaagtccccacaaagcaacgggacctcgggtgtggagcagatctgtgtggatgtccggcaatatggtatcattccttggaatgctttcccaggcaaaatctgtggctcggccttggagaacatctgcaacacgaatgagttctacatgtcctatcacctgttcattgtggcttgtgctggagctggtgccaccgtcattgccctgatccacttcctcatgatactgtcttctaactgggcttacttaaaggatgcaagcaaaatgcaggcttaccaggatatcaaagcaaaggaagagcaggaactgcaagatatccagtctcgctcaaaagaacaactcaattcttacacttaaaagtgtttgccagagcgtgtcagccaatgaattcacagctctgacacatcatcagacagctgctctgcagtacagatgtgtatcccaccaaactaatgtagacgtaccaacatttcactgtctgtctcaaactgctggggtagatctccaggaaaaccttccagtgggtaaatcagtttctttagaacaaatattggaggtttcactttagccattttaaaaggcaacacttttgacagaatgaccgttcatcctttgcaaagtcgtggcatgtccagttaactgctagagcagttttaacacgggatagaatcacatcacgttccttactggggacctatggcatgccagaatcaaaggatatgaccctagatttacatatgccacctgtcttcaagtgttatcaaaatagaatcagtgtcaagttcatttttgataactgacctttattaacctttggctcatcaaagataatgtgattcttccaaacttaaaactcagcaccctcacggtctcacacattcgaatgtttcccaagccactgagaaacctatcttctagtaataggaaaatgagctgcaagtgtgctaaatgtatcagtgcagaagctggattctgacccgagctctgcaaaacgagcttcccagttgatcacatcggaacaaaatgggactgaggatttggtgatcactattgtttggaaataaatgtcagctctgccttaatatttgctttcaatttctaatcatttatattgtaaccagaaacccaaaattcctacatagattattttgttccatgaatatctttcttaagaagtgttaccttgttaaagtgactaccattctaaaccatttttaagtggtctggacagtgagtttacagtttcatatcaactatctaaaacctaactgcaaattgaccacagacctctgaccttctacttttatagactttaatacataagtaatttaaattagggttggtatttatttcactgttttcctatctaaatcttaatttcccggaatataatgtttgatattcagcaagaaaactgcttgagtttaagccattttcaaaagaaacttgccttctaactcattgtgttccagaacattaagtgactaataggtactgggtattagtgatggtaagttttgtgttcttctttctggaatgatccatataactgtggggtgcatcagtgcttttcaaaggggctgcatactatagggttaactatgtatattcatgttaagagttaacttgtggtttggctgtttcctggattttaaaacatatacatgtgcagagatgtattcaaatgaaaggaagcatatctttatcaagatgctagtaaaactgaacatcaactataatattacatttggattttttttcttttggataatgccgagaaacgcctaattggattccttttaattgggagacgctctcttctgtgtagaacagttgttccaagatagcttagtgttttgttttcctgttgcatgacagaattattgtttccagcagtggaggtgctgttaagagtccagtgttctagaagaggcggtgtctaaagcctaattttacttttctaattctggtagctattgccaggagcttttgaaagttttgttgaagtagtctaatattttttatgtaaagagcattaaattttgctatgtataaatttttgtaacctaacagtgaatcaatattttctatcagtgccaagggcttcctgtagttctattcaagtgttacaataaatatttgtagataatagtcaatacttgtgtatgcttattttaaagatctatttaggtggaaatagttgtggatgtactaaagaataatgaaataaaattatagcttcaaaaaaaaaaaaaaaaaaaaaaa

SEQ ID NO: 332 - DNA, 1542 bp, Mus musculus
gagacgcggttgggagtcctacaagacggtcctcgataccctccccacaagtcttgggaccatttgggtccccagatctggggagatggtttgcggcggatttgcctgttccaggaatgcgctgtgcgctctcaacgtggtttatatgcttgtgggctttttgctcattggcgtggctgcctggggcaagggcctcggtgtggtgtctagcattcacatcattggaggagtcattgctgtgggagtcttccttctcctcatcgcggtggcaggactggtgggcgccgcgaaccaccatcaagtgctgctcttcttttatatgatcatcctaggtttggtcttcatcttccagtttggaatctcttgctcatgtctggctattaacagaaacacacaggcagatgtcatcaatgcttcgtggtcggtcttgagcaacagtacccggcatgaactggagagaagttttgactgctgtggcttgttcaaccttacaaccctgcgcctacaagatgatacttcctgtagtgcggtgtgcaaaactaagagctctacatgccagatgtgtggggagaggttccttaaacattcagacaaagccctcaagatcctaggaggtgttgggctcttctttagtttcacagagatccttggtgtttggctagcaatgagattccggaatcaaaaggaccctcgagccaaccccagtgccttcctatgagacttttgacctcccagatagcatctctgcagcctaggctgtttctagctagctctgtatccaaggaagaccttgaattccagaccctcctgcctcagcctcctgctggcatcaccacactcagccagcccctggatccttctgacttggctttgccatttttttgttttttgagacagggtttctctgtatggccctggctgtcctggaactgtgtgaactaggctggcctcaaactcagaaatccacctgcctctgcctcccaagtgctgggattaaaggcgtacaccaccactgcctggccttgccatctttacaaacacctaggggtggccctatggttttgttttagagaaaagaggtcccttacctcacccccaagaactggtggttggacttatgtctgttttgatgggaacacgattatggatgaggggaggtaggcctcgggccctaggagggtaactgcaccccccccccaagacccttggcttcaaggacagagtcagaacaccaagagaaaaccagttataacccagggcctcacaagtgctcggcaagcatttctaccaatcagttgtcattcccagccccacctacagtctcatcaaagcaggaccagtgaacttagaaactaaagccattttgaccgaatattcaaagaaagcatttctctctgatcttgccagccaaagagctggactgcctgcctaggtccttgcagggaacttgttttcgtgtttttttttgtttgtttgttttgttttccccaagtctccaagtgcaaagccaattggaaaaaacattaaagaaaaataaagagc

SEQ ID NO: 333 - DNA, 2509 bp, Mus musculus
gaggccggagttggttcccaaaagccctcgcttccggagtaccacacttccgggcgcggcctcttttccgccagctggggcgagttccaggctgagcccgggtgctgcgggtgctgcgtggcctgcggggcgtggcgcacagcgactgcagatgagggagtccccgagttgagtgccccagcgatggctactccctggaggcgcgccctgttgatgatcctggcgtcccaggtggtgaccctggtaaaatgtttggaagacgacgacgtcccggaggagtggctccttctgcacgtggtccagggccaaataggagccgggaattacagctacttgcggttgaaccatgagggtaaaattattctcaggatgcagagcctgagaggggatgcggacctgtacgtgtcggacagcactccgcacccgagcttcgacgactatgagctgcagtctgtcacttgcggccaggatgtggtctctataccggcacacttccagcgaccggtcgggataggaatttatggacacccctctcaccatgagagcgactttgagatgagggtatactatgacagaactgtggatcagtacccattcggagaggctgcctatttcactgacccaacaggagccagtcagcagcaggcttacgctccagaagaggcagcccaagaggaggaatcagttctctggacgatattgattagcattttgaaagctggtgcttgaaattctcttctgatcccttgaatatgctggagcacaaacccttattttcacagagcgattacagtttgctgcgaacctagctacttgacctggtgaaactctggttacttttttgtagactaggatggaaaaataaagccatacagttttgttacctcagtttactccccaagcaggaaaagcagcaagcacaatattttagagattaaaattcctataaaaaggagtctggctcaataaaatgtttaaatgcattttggttagtcaggtgagtaagaagattacagtaacaggctgtataaatcagattaaactgtactgctggtgcagaagttgatgactgtagaatttatagacatttaaatgaagtacagcacttcgagttttaaagtctttaacattttaaagccaggtggaaaatgcagtgacaggttcgctcttcccagagcctctgcacagtaggggtatggtacctgatacccaagcaagctctcctggcagcaagtattgacaaactgttgctgtgctggtgatttagagtccaaatcctgttgtaccagatcttgggccatttgccctttcctctgcttagccagattggagctttctggttattaggtaactatgatactacctaatcaggtcaagacagagtcataacaagtggtaactttgttatattcaagaagaaatacttcaaattaagttgctactacctctttctgctgatctctggaaaaaacaacactatgaaattaaagcctggggaaatgagccatttctctgactttgtttcaagggtagaagttgctaataaggaaataaatcaacttgatgtttaaggtcatcgttaatttcaaaaaagtttttattggcataaaaatgaaagtgttgtaaataaattggcaccaaatatcccaaacatgagggtcaaagcctattttacccctctttgctgtttttcccccttctgcccactttcctgggtgttgggggagctcgctgacaacagtcacaaatccagcgacctagaagaaaaattgttagttaatatagagtggaattttatttttataggactgagtacaaaccatctaatctcattcctgagctatctgtagtgataactccctgggatttttcagtgggagggagtacagactggttccttaagccaaggaagagaatgtaaacaacccttaatcagtgtaaccaatgcagttgaacgttagtgcatggccaaacggcattgtaaaaatcattttgtaccttaaacaaaactactgttacccttctgaaaattcaaataccatcatgcttttgaaagctcaacaacacaattcctaatgtagaacatgttaaagaagctggctttctatggccttttcctccactattctaacagtgttctctctctctctccctctctatccctctccatgcactttaaaactagcacctatcccatacacttgatctgaattactacaaaaacctaagtgactattcaagttgggtatttctaaaggacttccaggaccctttttttatagagtactatacggtgttaactatgcaactaagttcttctaattgcacaattacctgtataatgttttaatagaattactgtgatttactatttgaatctgtgtccatcctaaagttatctggaattgtcatgttgcctcactttataaaaatctcttagcatatgtaaagacatcgcagtcactttgttaatagataacctttaaaaataaaaccaaaccattgagac

SEQ ID NO: 334 - DNA, 3856 bp, Mus musculus
ggcctcacgtgatctcgcctagggagagaaagcctgaccccgtctcctgcgctcaccggcgtctctccgcagctctcggttcccccgcggagcttggccgccatgcggctcccttcggcagccgggccccggccgggccgtccccgccgcctgccggcgctgctgctgctgccgctgctgggaggctgcctggggctcgtgggggcggctcgcaggcccaacgtgctgctgctgctcaccgacgaccaggacgcggagctcggcggcatgacgccactgaagaaaaccaaggccctcatcggagagaaggggatgactttctctagcgcctatgtgcccagtgctctttgctgccccagcagagccagcatcctgactggaaagtacccccacaaccaccacgtcgttaacaacactttggaagggaactgcagtagcaaggcctggcagaagatccaggagccgtacaccttcccggccatcctcaagtcggtgtgcggctatcagaccttttttgctgggaagtatttaaacgagtatggagccccagacgcaggcggactggagcacatccccctgggctggagttactggtatgccctggaaaagaattctaaatactataactacaccctctccatcaacgggaaggcacggaagcacggcgagaactacagcgtggactacctgacagatgttctggccaacctctccctggacttcctggactacaagtccaactctgagccattcttcatgatgatctccactccagcgccccactcaccgtggacggctgctccgcagtaccagaaggctttccagaatgtcatcgcaccaagaaacaagaacttcaacatccacgggacgaacaagcactggctaatcaggcaagccaagactcccatgacgaactcgtcaatacggttcttagatgacgccttcaggaggaggtggcaaaccctgctctcagttgacgaccttgtggagaaactggtgaagagactggactcgaccggagagctggacaacacgtatatcttctatacctcagacaacggctaccacacagggcagttctctttgccaatagacaaacggcagctgtatgagtttgatatcaaagttccactgttggttcgagggcccggcatcaaaccaaaccagaccagcaagatgctggtctcaaacatcgacttgggtcccaccatcctggacctcgctggctatgacctgaacaagacacagatggatgggatgtccctgctgcccattctgaaaggagacagaaacttaacctggaggtcagacgtgctggtggaatatcaaggagaaggccggaatgtcaccgacccgacctgcccttctttgagtcctggagtgtctcaatgtttcccggactgtgtgtgtgaagacgcgtacaacaatacctacgcctgcgtgcggacactgtcatcattgtggaacctccagtactgcgagttcgacgaccaggaggtatttgtcgaagtctacaatatcactgcagatccagaccagatcaccaacattgccaagagtatagaccctgagcttttgggaaagatgaactatcgtctgatgatgctgcagtcctgttctgggccgacctgtcgcactccaggggtctttgaccctgggtacaggtttgacctgcgtctcatgttcaacagtcacggcagcgtcagaacgagaaggttctcgaagcatccgctctagcagcctctgcgttggatccttgcacagccttttccggtgccgtggttggagtgggagcccacgcctcgggagctctggccttgctctttcaagtcttgtttgaaaaataatccagtcagctgacttccagtactgtgaatccgcccctgtcagaagtggctgaccctgtttctcctcagatgacaaccaccactcctgaggtctttgtcctctccttgtcccttcatcttggctgggcacagtatatgagtccccacgtggtcgagtctggatctgtaaaactcttctgataatggcaatactttagggcagagataaaaccttttggtattttagctagcccccaaatcaaaagcactgtatagcatttcacaccgagcccctcaccaaaactcacacagttgcgagaagagctgctgtctgtggacacgtagagaaaggacattcatgacatccctgtggtgtggttaatgtgcgacgtgtcgcccaagctctgccctaagaagcttcttagtgactccagccacctgagagcgcccaggagcaccagggggggccagatgcgcttcctgagctcttggatcagtgcgctgaagggccgcacttacaagtgcctgtctggagggttctcaagtgtcagcgccacacaagtcatcctgcctggctgcagttagctgtcattgtcattgaaaatcttagtgtctcctggtggaggggaaggaccggctgcctcaccccactccctgatctcacaaaagtgcgagtttccagtcctgactaactagggctccagtcagtattcccctggccggcttcccagatgccctggacggcactctgttccttaaagtccagttccaccctgacgtccacagaggcagcacggagtggcgaaactcggttccagcctgtcgtcggcagtgagcgggtttagctttacacagcctctgcccagctttaacttgtaagacagctatgagtcactttgagaattccagaggccatgttggggggacagccattgagtttattcctttacctcatgtgaccccagcaactttggtgatactgagaggccagcaggcagtagagtggacacctcggccgtggccactttagagggggaaaagtttaagttttaaactaaaagttacagaattgaatgtggataccggcttcattcacccccacttggattctaaacatgaccagtgaaatagtgaaagctgaccacagttgttcccaaataaaggtcggcagctcctaccaggtctgggattgagatgttagagtcttcagttttatagccggctcctgaaagcaggcgacatcagagtggtaacagtcagtaggctgcagtaggtgtcctacctcgaggccctcagatggaggtaacacattaggattgtgggacacaagatcctctctgaacctcctggttaaggaacgttcctgcaaacattcaagtagaccttctataacagactgcagcgtgcatggcctctacccacaagagatgcactgcaggaggccggccctgttctctgtactcagcattttgacatctcctttgaaggccaggtatatgtgtaccagtgctcttcaaagggagaaccattaaaaccaacatggaatgcagggacttcgccttataagatttccagttttaaaactgcccctcagatacaatttcaaagtagggtacacattagagtgtctttgagttcaacaagttggtactgttgcaaacaccttctgaattgccagcgcccgggtttttatgtaaaaatagagtggctatggaagttacaccttcatctgtgggaagtattctcaaacgtaggggtatctttatcttatgttttctaatggaagatggcagcccagaatcctcaagacaaagcaaggggtatcagctgatggccgcgggactgatgggtgtcctgggttctttagctcaccagcactttgcgctcaatggactttgtaaattctcatcagatgttgtagaagttcctctgcctggagctgtcatctcagccgctcccttagaaagtgcccttcaacggaccctgttcactgctgcacttctcaatgaattaaaactgacttctgttct

SEQ ID NO: 335 - DNA, 3456 bp, Mus musculus
gcagctgcagcgggtggcggctgtgtccaggagggctccgaccgtcaaggcgccgtcggggctgcaccgcaggaatggggaaggattcgcagaattactacgggaagcacgggacgcctcagaaatacgaccccaccttcaaaggacccatttacaacaggggatgcacagatgtcatttgctgtgtgttgctcttcctggccatcgtaggctatgtggctgtgggcatcatagcctggacccatggagaccctcggaaggtgatctaccccactgatagccggggcgaattctgtgggcaaaaggggacaaaaaatgcggacaaaccgttcttgttttacttcaacatcgtgaagtgtgccaaccccctggtcctgctggaatttcactgtcccacccctcagatctgcgtgaagcagtgtccagaccgctatctcacccttctgagtgcgcgcaacactcgcgactttgactattacaagcagttctgtgtgcctggcttccagaacaataaaggggtgactgagatactccgagatggggagtgtccagcggttatcacccccagcaaacctttggcccagcggtgctttcccgccatccatgccagcaaaggagtcctcatggtgggcaatgagacgacctatgaggacggacatggcgccagaaagaacattacagatctagtggagggtgccaaaaaggccaacaagattctagaggcccggcaactcgccatgcagatatttgaagattacactgtatcctggtactggattatcataggtctggtcattgccatggtgctgagtctcctgttcatcgtcctgctgcgattcctggctggcattatggtctgggtgatgattgtcatggtgatcctggtgcttggctatggcatcttccactgctacatggagtactcgagactccgtggagaggcaggctccgacgtctccctggtggaccttggcttccagacggacctccgagtgtacctgcacttgaggcagacctggatggcttttatgatcattttaagcatcctggaagtggtcatcatcctgttacttatctttcttcgcaaaaggatattgatcgccatcgccctcatcaaagaagccagcagggctgtgggacatgtcatgtgctccctgctctacccactggtgaccttcttcctcttgtgtctctgcattgcctactgggccagcacttctgtcttcctgtccacctccaacaccgccgtgtacaaggttgttgatgacacagcctgcccacttctgaggaaaacctgcaacccagagaccttccccttgcggaatgagagcctccagtgtcccactgcccgctgccagtttgccttctatggtggcgaatcgacctaccaccgtgccctgctgggcctgcagatcttcaatgcattcatgttcttctggctagccaacttcgtgctggccctaggccaggtaaccctggccggagcctttgcctcctattactgggctatgcggaagcctgatgatatgcctgccttccccctcttctctgcttttggccgagcactcaggtaccacacgggctccttggcttttggctcccttatcttagccatcgtgcagatcatccgagtgatgctggaatacctggaccagcgcctaaaagctgcacagaacaagtttgccaagttcctcatggtctgtctcaagtgctgcttctggtgcctagagaagtttatcaaattcctgaataggaatgcctacatcatgattgctatctatggcaccaacttctgtacctcagccaggaatgccttcttcctgcttatgagaaatatcatcagggtggccgtcctggacaaagttacagacttcctcttcctgttgggcaaacttctgattgtgggtagtgtgggcatcctggccttcttcttcttcacccatcggatcagaattgtgcaagatacagccccacctctcaattattactgggttccgatcctgacagtgatcattggctcctacttgatcgcgcacggcttcttcagcgtctatggcatgtgcgtggacacgctgttcctctgtttcttggaggatctggagagaaatgacggttcagccgagaggccttacttcatgtcttccactctcaagaaactcttgaataaaaccaacaagaaagtagcagaatcctaaagacacctgcctcccagccctctcaggacgccgggataggtgcttgctgtgcagctgggtcagagtccccagctcatcagacttgcctaacacatcactgcctctctgcaccctccccgagttcccatttccaggaacctagaggactggggcatctctttcctatgccaaagggcacttgggagttttcagtgcagccctggaagatgggacagaatggatctctccagctcttactggctcagacggtgccaatatggtgaagtaacttgaagtcgaggatgggagatggccctaggatgtctgcagcaagcttctttgtatttcagtaacccttctggccaagagggaaagactggatgagagtgggcaagtcagctcagcgaacactagcgccaagctccccagcggggacagaattggatctccatagctgatgtacctaagggccagcaaatacacgtctcactcttagtcctttgtagcctaggcagacagtaaggggtctacctgcttctcttccatcaggctccagaactggatggagccaccaagagtgccttcatatgtaaccccacctccagcgtgggctggctatggtcacaggaagaagtgtgcacccagaactggaggagtcttctggataaacagacagcatctgcgaggagggccctgtgtgaggaacgattggtgctgctgctgctggttgggagtagttgtggaaaacaggcctctgtacttagaccctacagagttgctttgactgatgacttctaaatggaaaacttgaggttggaaaatgaatgaaaatagggcctgtctccccagccctttttctgccagtaatgcacactgctctctttgtaagagatgagaaacttaagttcacccaagggatggtttcagggactgaggtgtgggtgtgttctatattccaaattaactaggcctatctggtttctttcacttgaaactagagaatctgtttgccaaacttcttgatcttgggagccagtagactggttcttcactttacctaccgtatgctaaggcccgcccctcacccctactttggccatccgtaagatagcaggatcttggagacaccgctcccagcctgaggtcccaaggtttcctgtgcctgccttgtgtgccatcccaacccaccctcttgtatgcccagccctgtgcttatgtaattgcattccggccagttaataaagtgcctcttgtacagagaaaaaaaaaaaaaaaaaaaaaa

SEQ ID NO: 336 - DNA, 3450 bp, Mus musculus
gtgggcgttctaggcgggagctgcctttgctgagttctccgggcgggacgccgtctcccgactgttcgggcgctactgaaaactactcactgccagtgtcggggtcctgtgttcacgaccaccactgaatagttgagggccctgttcgcttcctgcacggatccagcctcggcgtcctctcagcagccggtgtcgccactggcgccgccgcccgagcggcaggccgctgcggatcgcggagcccatgaaggctcgggccccgccgccgcagtggcggcgtcgccagtgtcttggagcgctccgaacctgctctggcatgacggcggcatgagcacggacggggagtcgcttgaggagccgaggtggaaggcggtggcctcacccaaggcgtcaaccatgcccgagaagcgcgggagcgctcaggccgcgagcggcagctggctacaaggttttggccacccaagtgtttaccatgctgcttttgtcatcttcttggaattctttgcgtggggcctgttaacaactccaatgttgactgttttacatgaaacatttcctcaacacacattcctcatgaatgggctcattcaaggtgtaaagggcctgctctcttttctgagtgctccgctcataggcgctctctctgatgtttggggcaggaagccctttctccttggcacggtcttctttacctgcttccctatcccactaatgaggattaacccatggtggtattttggcatgatttctgtatctggagtcttctcagtcactttctctgtaatttttgcctatgtagctgacttcactcaagagcatgaaagaagtactgcttatggctgggtctcagccacctttgcagctagtctggttagcagcccagccattgggacatacctctctgcaaactatggagacagtcttgttgtgctagtagccacactggtggctctcctagacatctgcttcattttgatagcagttccggaatctctatcggagaaaattagacctgcttcctggggagctcagatctcttggaaacaagcggacccttttgcgtcattaaagaaagttggaaaagattctactgtcttactgatctgcatcacagtgtttctctcatatcttcctgaagctgggcaatattcaagcttttttctctatctcaggcaggttataggttttggatctgtgaaaattgtagcattcatagctatggtaggaattctgtccattgtggctcagacagtcttccttagcaaattgatgagatcactagggaataagaacactgttctccttggtttgggttttcagatgctccagcttgcctggtatggttttggatctcaggcctggatgatgtgggcagcaggaactgtggctgccatgtccagcattacattcccggcagtcagtgccctcatctctcggaatgcagagtcagatcagcaaggggttgcccaggggatcgtaactggaatacgagggctgtgcaatggcctagggccagcattatatggcttcatattctacatgttccatgttgaactgagtgagttgggcccaaaattgaattctgatgatgatcccttacagggagctttcatcccaggcccaccatttttatttggagcatgtatagttcttatgtcttttttggttgccttattcatccctgaataccgtaaaaccagtggagttcaaaaacataacaacagcaccagtggcagcctaagcacaccccctgaacggggcagtgatgaggacattgagccgttactacaagacagcagcatctgggagctttcctttgaagagcctggaaatcagtgcactgagctataacccagtagtaatggagattctgcagacaccatctctgagagccatagaggaagctgcaccacgtggagacttcatggtgctggaggggcgatgctagcagcatcctttgggccacgtttaataagttattcttcccatacctctgcccttcactcttctgtctctctctgttcttttattcccattctttttttttctttctttctttttatatatatatatattctaggaaagattgaaaattcttcaagattatttagaatctagactttaaaactttaatagaaaaatcatgtcggtggtaggaaaggtggtcggtctttcccttcagtaactagaataagagtgacagatatttttctgttttttttggtagaagattgggacagtagtgttaactgcctcctttcattgtctttttgtgaatcattccctcttagtctataaatgttgatgagttgataagaatcacatggtatcagggacctactgaatttgtccagaggttagatgaaaaccagttttgctttccctttgttttctctacttcttaagcttctcaaaaatgaacattattaatattgatcagtgctcacatttatcagataaaggaaatctttcttagaaaatttaagttatgttgaacaagcagctcagattcttaaactttgtgtcctgattgaggttagccttggcaacatactaagagcctaagcatatctcaaggcaaaacaaccaaccatgaagctttctagtggcaacaaggaaatcagagaatacttcaggaaaagttttctgtttattattttgttttaaaattttaaatattcctaaaaggggagagagtaagatagcagtgtttatttttaagttcatactcacatgttactgtatgctcttccccgtgtctctttgtcctacttctgtttctgtaccatattcctgccttaactgttaatgtagaatgtgtttgtttttgactaatctgtatcttggtatgtttttccgaatcccataggaatgcgcacatcaaattcctttctaaaatatgagggttagtggagctcagtttcatgataagtgtcttgctaatttttgaggtgttttatggacaaagaaaactacagattttatattttgctgcatagtaaatggactattaacttgggtctatcttcaacaaagtactcctttgaaagttttataggtatgaaaacatgtagatatttgtaaggattttaattttttttgatggggtgctgtgtaaatcttgtatttataaataatgaaggtattgacagaaaatatatacaacttttataagggatcatgtattgactgaatacatttaaaggaaaatatattttgaagcctgttctgccatgaacagatataacatatctttttactatgctgttggtttttaggttaagcttcctaatgcataataaattttcaatggatacttatatggcttaaaaacaatttctgtcattgctcttttgggttcttttgggggggggtggctatccacacaactgagttagtaatctttcaactaattaaaaaatggttttaaaaaaaaaaaaaaaaaaaaaa

SEQ ID NO: 337 - DNA, 2159 bp, Mus musculus
cagagccttcccccgcagccctgcttagagctgtcccgtgcaccctgagccgggtgtgcaaaccagccagacccctcctccagcagtcctggtcctgtggacttgcgagcaatccagtccttagatgctttggttccatcttaaaagctgttcagcttgacttcagaagaacagtttggaggacgtaccatgcgggcactgtgcctgctttgttgggctgttctcctgaacctggtgcgagcttgtccagagccctgtgactgtggggagaagtatggcttccagattgcagactgtgcctatcgtgacctagagggtgtgccaccgggcttcccggccaatgtgaccacactgagcctgtcagccaacaggctgccaggcctgccggagggagccttcagggaagtgcccctattgcagtcgctgtggctggcacacaatgagatccgctcggtggctattggtgctctggcccctctgagccatctcaagagtctggacctcagccacaacctcctctctgagtttgcctggagcgacctgcacaacctcagcgctctgcagctgctcaagatggacagcaacgagttagccttcatccctcgggacgcctttagcagcctcagcgccctgcgttccctgcagctcaaccacaaccgcctgcacgcgttggccgagggcaccttcgcaccgctcaccgcgctgtcccacttgcagatcaatgacaaccctttcgactgcacctgtggcatcgtgtggttcaagacatgggccctggcctcagcggtgtctattccagaacaggacaacattgcctgtactacaccccacgtcctgaagggtatcccactaggccgcctgccacccctgccctgctcagctccctcagtgcaactaagctaccagcccagccaagatggagcagagctacggcctggcttcgtgctggcactccactgtgacgtggatggacagccagtcccccagctccattggcacattcacaccccgggcggcacggtggagatcgccagtcctaatgtaggcactgatggacgtgccctgcctggtgcccttgcaaccagtgggcagccacgcttccaggcctttgccaatggcagcctgcttatccctgactttggcaagctggaggagggcacctatagctgcctggccaccaatgagctaggcagtgccgaaagctctgtaaatgtggcattggccaccccaggtgaggggggagaggatgctgtggggcacaagttccatggcaaagcagtggagggcaagggctgctatacggttgacaacgaggtacagccatccggaccggaagacaacgtggttatcatttacctcagccgtgctgggcccccagaagctgcaatagcagcagacgggaggcctgcgcagcagttctctggcatacttctgctaggccaaagcctgcttgttctctcctttttctacttctaactacaccctgccctggttggctagagcagctccagggccttcctaactccccctgatcacgttcctgccaatgttccgtcttaacaccacgaggtctggaattggtgaggcctgaggttagcctggggacttcacattttcctatcaccttttctaagctcatccaggccgctcattactccaatttgcagatctgctcagaactagcagctaggatagaactatatcccaaaactcatcatctctagtgctagttgctgctaacagcattgcctgtgctcctagcaggggcagcctgctaacagggcaacaacaatgtcttaacctgacctactttgagagttctagccatggaggtaaagagcttgtggaggccatccaggtgggcactggggctgggctagaagggggtctggagtggccagtacaggatctggaaaggaggtaccacgggccatggctgggcaggctaaaagctttcctgtttttagatgctctctgatgagatatggaaatcatccctcactgggcctttctctcctctcaccccaagccccacagcatgtgcctgcctcttgagacacttactccccctcctcctctgaagaggctagccagtctgggtagcagaaaaataaataaataaataaataaataaataaataaataaaaaaaaaaaaaaa

SEQ ID NO: 338 - DNA, 2202 bp, Mus musculus
cgctctctggagggcggcgccgagggccgagccgagaagatgtacttgctgccccttccggctgccgcgcgagtcgcgctccgccgcctgggagtgagaggtctctgggatcggggtctgtccaccgcagacatgacgaagggccttgttttaggaatttatgccaaagacaaagatgatgacctgccacaatttacaagtgcgggagagagttttaataagttggtgtctggaaagctgagggaaatgttgaacatatctggacctcctctcaaagcaggcaaaaccagaaccttctatggtctgcatcaggacttccccagcgtggtggtggtcggccttggcaagcgatcggctggagttgatgaccaggaaaactggcacgaaggcaaagaaaacatcagagatgctgttgcagcgggatgcaggcaggtccaagacctggagctgccgtcggtggaggtggatccctgtggagatgcgcaagctgctgcagaaggagctgtgcttggtctctatgagtacgatgacctgaagcagaagaagaaggtggctgtgtcggcgaagctccacggaagcggtgatctcgaggcctgggagaaaggggtcctctttgcttctggacagaacttggcccgtcatctgatggagtctccagccaatgagatgacaccaaccagattcgctgaaatcattgaaaaaaacctcaaaagtgccagtagtaaaaccaaggtccatatcagacccaagtcctggatagaggaacaagaaatgggttcgttcctaagtgtagccaaggggtctgaagaaccaccagtcttcttggaaatccactacatgggcagccccaatgcaaccgaggcacccctggtgtttgtggggaagggcattacctttgacagtggaggtatctccatcaaggcttctgcaaacatggacctcatgagggctgatatgggaggagcagcaacaatatgctcggccattgtgtctgcggcaaagctcaacttgcccattaacatcattggtttggcccctctttgtgaaaatatgcctagcggcaaggccaacaagccaggggatgtcgtcagagccaggaatgggaagaccatccaggttgataacactgacgccgaggggaggctcatcctggccgatgcactctgttatgcacacacctttaatcccaaggtcatcatcaatgctgccaccttaacaggtgccatggatgtagccctggggtcaggtgccactggagtctttaccaattcgtcctggctgtggaacaaactatttgaggccagcgtagaaactggggaccgagtctggaggatgcccctctttgagcattatacaagacaagtcatagattgccagcttgctgatgtcaacaatcttggaaaatacagatctgcaggtgcgtgtacagctgccgcattcctgcgagagtttgtgacacatacgaagtgggcacacttagacatagcaggagtgatgaccaacaaagatgagattccctacctgcggaaggggatgagtgggcggcccacgaggactctgattgagttcttacttcgattcagtaaagacagttcttagttcactcacagattactccatctgtcttgaattggatatttgaccttcaaaatatttttgaatgaatgaaaatcttttaaagactaaaatgaatgttgttcttttttttaatcttaatttttggaatactttaatatgcttgaatcatggaaatctaaatgatatatgacttaatataggccctttaaactattaaaacatcttgtaataatatgcattttcaagccatatttactatttttacaagataggggaaatcttaagtccataaaaatggacaaaggccaggcatggggtgcagaactttgatcccagcatttgggaggcagaggcagctcgatttctgagtttgagaccatcgtggtctacagagtgaattccaggatagccatggctatacagagaaaccctgtcttggaaaagcaaaacaaaacaaaaacaaaaaaaacaacgcataccaccaccaccaaaatgtagaaaggaaaatataatgaatgactttgttatattttccaagttttgattcttaaggtagattatttaagtgttcctataactttcaaaatctgatccaatgcagtaaataaaatatttccttctgct

SEQ ID NO: 339 - DNA, 5450 bp, Mus musculus
ggcggacggagggtggcgtgtgcggtcgggaggccagagcttcgagccatccgggctgcggctccgctgagggaccggtggtgtgggccgggatccgcggggctgagggacgctcaggagcggcgaggctcgcgtccggaaggaagacccgatagaaggaacatgacatctagaggcagcgaacttgtttccgattcatgctttatcatttcttaatttcgtatgttgggaacatccctgcaagatgtcagcaccaaggatttggctagcgcaagctttgctttttttcctcaccactgaatctataggtcaacttttggaaccgtgtggttacatctaccctgaatttccagttgtccagcgcggctcgaacttcactgccatttgtgtgctgaaggaggcgtgtctgcagcattactacgtgaatgccagctacatcgtgtggaagaccaaccatgctgctgttcccagggagcaggtcactgtcatcaacagaaccacgtccagtgtcacgttcacagacgtggtcctcccgagcgtgcagctcacctgcaacatcctgtcctttgggcagatcgagcagaatgtgtatggagtcaccatgctttcaggctttcctccagataaacctacaaatttgacttgcattgtgaatgaggggaagaatatgctgtgccagtgggaccccggaagggagacttaccttgaaacaaactacactttgaaatcagagtgggcaacagagaagtttcctgattgccagtcaaagcatggcacttcatgtatggtcagctacatgcccacctattatgtcaacattgaagtctgggtggaagcagagaatgcccttgggaaggtctcctcagagtctatcaattttgaccccgtggataaagtgaaacccaccccaccatataatttatcagtgaccaactcagaagaattatccagtatattaaagctatcatgggtcagttcagggctgggcggtcttttagatctaaagtctgacatccaatataggaccaaagatgcctcaacttggatccaggtccctcttgaagatacaatgtctcctcgaacttccttcactgtgcaggacctcaagccttttacagaatatgtgtttaggatccggtccattaaggacagtgggaagggctactggagtgactggagtgaggaggctagtgggaccacatacgaagacagaccatccagaccaccaagtttctggtataagacaaatccatcccatgggcaggaatatagatctgtacggctcatatggaaggcactgcctctttctgaagccaatgggaaaatcttggattatgaagtgattcttacgcagtcaaagtccgtctcacaaacgtacacagtcactggcacagagctgaccgtgaatctcaccaatgaccgctatgtcgcgtctctagcagcaagaaacaaggtgggcaaatcagctgcagctgtcctcaccatccccagcccccacgtcacagctgcttattctgtagtgaatcttaaagcatttccaaaagataacctgctctgggtggaatggacacctccacctaaacccgtgagcaagtacatcttagagtggtgtgtgttgtcagagaacgcaccctgtgttgaagactggcagcaggaagacgctaccgtgaatcggacccacttgagaggacgcctcctggagagcaagtgctatcaaatcacagtaactcccgtattcgccacggggcccggaggctctgagtccttgaaggcgtacctcaaacaagccgctcctgccagaggaccgactgttcggacaaagaaagtggggaaaaatgaagctgtcttagcgtgggaccagattcctgtggacgaccagaatggcttcattagaaactactccatatcttacagaaccagcgtgggaaaggagatggttgtgcatgtggattcttctcacacggagtacacgctgtcctctctgagtagtgatacgttgtacatggtccgaatggccgcgtacacagatgaaggtgggaaagatgggccggaattcacttttacaacaccaaagttcgctcaaggagaaatagaagccatagtcgtgcctgtgtgcttagccttcctcctgacaaccctgctgggcgtcttgttctgctttaacaaacgagatctaattaaaaaacacatctggcctaatgttcctgatccttccaagagtcatattgcccagtggtcacctcacacccccccaaggcacaattttaactccaaagatcaaatgtactcggacggcaatttcactgatgtaagcgttgtggaaatagaagcaaacaacaagaagccttgtccagatgacctgaagtccgtggacctgttcaagaaggagaaagtgagtacagaagggcacagcagtggcatcgggggctcttcatgcatgtcctcctccaggcccagcatctccagcaacgaggagaatgagtctgctcagagcaccgccagcacggtgcagtactccactgtggtgcacagcggctacaggcaccaggtcccgtccgtgcaagtgttctcaaggtccgagtccacccagcccctgctagactcggaggagcggccagaagacctgcagctggtggatagtgtagacggtggggatgagatcttgcccaggcaatcgtatttcaagcagaactgcagtcagcctgaagcctgtccagagatttcacattttgaaaggtcaaaccaggttttgtccggcaatgaggaggattttgtcagactgaagcagcagcaggtttcagatcacatttctcagccctatggatccgagcaacggaggctgtttcaggaaggctctacagcggatgctcttggcacgggggctgatggacagatggagagatttgaatctgttggaatggagaccacaattgatgaagaaattcccaaaagttacttgccacagactgtaagacaaggtggctacatgccgcagtgaaggactggctcctgaacttcagcaggaactgcaaaataaagctaaagacgagtggcttcagatgagaaacagtcctcactccctgaagataggcattgcctctaaggacaaagtcacacctgggccgtctccattccagagtagctggaattctccttcaagcactacatgaactgactttatcctctatagctggaggactctgtgctctttcagaatgtttgcactgccgaaaacaaagtgtgtctgagtttataaagctgttggtttgctacatagaaaacgggggatttaaatgagccacaatgtcatggcatcgttcagctgggctggttttgatgagactgaccatccagatgccagcgagaaggccagcagcatcatttaaaagtgccctgtggcacagtgtccagattatgtcatctagaagacgaaagaatggaggggtggctcgtttctgggtctgtcagagaagcatggcctgctccttgctgttggtatcgatgccggttactactgaggaagaggataaactttaaagagaagcaacatagaagcacccgctttcttatagtcacctacagcctcccaagaaactgcttattattgaaaatgtctttccgagtcaatttcatccaccctatagtggaccaggctggcctcaaactcagagatctgtctgcctctgcctctgcctctgcctccagagtaccgggatgaaaggcagtgcaccaccactgctccacttacgaagattgctgtttttaaagacttaagttgttgacatttttctgaacacacataaccacaccagggacagatgattctagagactggttgaggaagcactttatccagaatgtcttcaactttaaattactttaattgactccaccttgttttgattttcaagaatagcagggtgtttgttgaagggtggcatttcccagagcctcatgcagtcccagaacacacatcccaaccatgtcagcgaccaccacaatgacagaagtcctcctacagagctgaggaagctggaagggtcctgctagtttgcagggtgggctttgaacccacagccctgtgcatgctagacattcactctaccgctgagctgctcctccgcccggctcattatgtcatctaggctctcgtgatcctcctggcccagcttcctgactgtctgggactgtggatgtgtgctgtcacacacccaaccaggtctttttaatatctgccatttatgaggtagagtttttacacgacttaggactatcttaaacctattccttctagttgctttattaaggaatagcctaggcatccagtgtttagcactaaagccattaatgtatttgtgcctaacttcccagtgtgacatggaggtgggggctaaaggtagacactgggcagacaggaattggctgagcgccgttagaggctgatcactaagtgtgctcacaggaaaagggttgaagtttcagagcatgggcacccagatcatttatagcggttaccacacagtgcctaggaggagttgatatgcacttagttggatgcagtttcaccttttactctcagaaggttgtttatattctacttgctgatgtgttatcatttatatttttatactgggtagtccttttctgtgttctttcacatgtataatcctcgtgagactgtacatgctttgctctggtatattcagttgcctccttggcaaaaccagcctggaattgccaaaatgccggaagtgaagggagatggtgaaagtcgggcacaggaaggccaggtcaggggcagagagaccagaattcacactacaaggctggcaccattgccattcaagttggacgtcaaagcctgatcccagttaggactgagttttctatgtatatatctgccaggaagttaacacttgctgaatttctcatcttctcacagtaagcagtctagttatgggactctatccatgttcagctgtgacttccctcatatcagacagtggtgctgtgaacgttgcagtgtgaagtctgtactggctagggatggtagcccagcgtgagttcaggcatgaacatagaggccactgaaggaagagcctcctggaagcaagttggcacgttaaatcccagacagaaagtgtcccagggagccagggcctccgccagcagggagggggtgtgctcactgcaggaacgttcatttagaagatgtaccatggagcacctccctttgctctaagagaaaacccatcttaaagttcatcttgaatacagacttcgctcgagcatgttttagaataatctggatgctgtaccttgtaccttaggtagcagagaaagtaatctggcgtctttctgtaaaaccgtctaataaagctagttctgcccgtgaaaaaaaaaaaaaaaaaaaaaaaaaaaaaaaaaaaaaaaaaaaaaaaaaaaaaaaa

SEQ ID NO: 340 - DNA, 5870 bp, Mus musculus
aaacactccctatgagtcagctgtaaattcaattcaaatccccagtctcctagtctcctcctctcatcatggttaccaccaaaatgactgctgcctttagaaaccctaataggagacaggtggcgacagacaaggtggcagaaaagctgagttctactctctcatgggtgaagaacacagtatcgcatacagtcagtcagatggccagtcaggtggcaagtccatctgcctcactacacactacatcctcatctaccacactgtcaacaccaacacagtcaccatcttccccatcaaagttgagtccagacgacttagaactcctggctaagctggaggaacaaaacagattaatagagacagacagtaagtctttaagatcagtgaatgggtcaagaagaaacagtggttcctctcttgtatcaagttcatcagcctccagcaacctcagccacctggaggaagactcttggattctctggggaagaattgtgaatgaatgggatgatgtacgcaagaagaaagaaaagcaagtgaaggagcttgttcgtaaagggataccccatcacttcagagcaatagtgtggcaacttttatgtaatgcacagagtatgacaattaaggaccagtattcagaactcctgaaaatgacttcaccttgtgaaaaactgatacgaagggacattgctagaacttatccagaacacaacttttttaaggaaaaagatagccttggacaggaggttttatttaatgtaatgaaggcatactccttagtggaccgtgagttggttactgtcagggcagtgctttcatcgttggattgttgctgcatgcagatgccagaagaagaggctttttgtgtatttgttaaattaatgcaagactacagacttcgtgaactatttaagccaagtatggcggaattgggcctttgtatgtaccagtttgaatgtatgatacaggagtatcttccggaactctttgtacattttcaatctcagagttttcatacgtcaatgtatgcatcatcctggttcctgacaatctttcttacaactttcccactaccaattgcgacaaggatatttgacatctttatgtctgagggtttggaaatagtgtttcgagtaggattagcgcttcttcagatgaatcaggcagaattaatgcaacttgacatggaagggatgttacagcactttcagaaggtcattccacatcagtttgatggtggcccagaaaaattaatccagtcagcttaccaagtcaaatacaactcaaaaaaaatgaaaaaacttgaaaaagaatacactacaataaaaactaaagaaatggaagaacaaggtgaaattaaaaggctacgcacagaaaataggcttttaaaacagcgcattgaaacattagaaaaacataaatgcagttccacctacaacgaagatttcgtgctgcagctggagaaggaattggttcaagccagactgagtgaagccgagtctcagtgtgcactgaaggagatgcaggataaagtgttggatatagagaagaagaacaactcatttcctgatgagaataatattgcaaggcttcaggaggaactcatcgctgtgaagctgagggaagccgaagccattatgggtttgaaagaacttcgacagcaagtcagaaccttagaagagcactggcagcgtcacttagctcgaacttctggaagatggaaagacccacccaagaaaaatgctgtgaatgagttacaggatgagctgatgagcattcgccttagagaggcggaaacacaggcagaaataagagagatgaagcaaaggatgatggaaatggagacacagaaccagatcaatagtaaccaacttcgaagagcggagcaagaggtgaacagtctgcaggagaaggtgtgctcgctgtctgtgaagaacaagggcttgcttgcccagttaagtgaggcaaagcgcagacaggcagagattgaatgcaagaacaaggaggaagtcatggctgtgcggctccgggaagctgatagcatcgcggccgtggctgagctgcagcagcacattgctgagcttaaaatccagaaagaagagggcaagctccaaggacagcttaacaggtctgactctaaccagtacattagggaactgaaggaccagatagcagagctgactcatgagctcagatgcctaaaaggccagcgggacttctccagccgacctccttttgatggaatccacattgtcagccatctaataggagacgatgaattgttccactcatcggatgaagattttatagatagttccttacaggaaagtgccattggttttcctttgcacagaaaatctggcccaatgtctctgaatcctgctttggcagatggcagtgagagcgaagcagaagacggtatgctgggacctcaggagagtgaccctgaggctccacagaagcagcccccacagagagagtcctactcaactaccgtgtgaccgtcactgtgacagccggagtcttgagggcagcagtgttacaggagaagagctggagccatcccttgtcctgtacatatgtctgtttacagtcttacctgactgtctttgccaaatgctcactgaatttccattgccacagtagactgaagtatgctaattggtaaatggggttctaacagtattactgaatataaatttttcctatttagaaaatactgctatgtctaaatgtgagaattgtttaaaaattgaggactatgggaaattggattctttttaaacaaaactgctcttgtgcaatattttatgctcattgaacaaactgtacatttgtgtttattagtttccaagtcagctgcctgtagacgtgtgaccagcacagagatgtgatttatcctgtgcttggcatgtctgtttcttcactaaaattcagttctgttagtggccattggagactgtcacacaaacaccttttctttgtataatttctaaacacaaagtaattgtctgttctgaaagtttttgttttagtttctaagttttatgtgtattatatttctgtgtgttagtcagaatagtagcaggttagctacagatatattatttgtacatatttataaatctaccacccaacacctcttacttacatgagtagcaaacattgactaggactgccttcagcattccaacagaacttgtgtaaaataacaggttaaaagacaactcaatacagatcagacactactggcttagcagctgtagtaacttgcagattcataactgattgctgtccaaacactactgatgaagccctttactccatctgtaactaataatataagttccacgattaaagaggttatagcacatgctacttcttgctaatctatttaatataatttagcactagaataaagtccaagatgcacacaaatatatctgaaaaagaatgttgtgagtattgtattaaatccttcagcttctaaccgacaggtaaagccataaaaaccctttactcagttgtttccttgtgttcagactttttctctagaaagccgagtgcctgttagttgtgaattgagaaaggacacccaacctgtggagaggcggcaggctgctgctgactggatgcctccacactcttttgttagcagcctaggaaaagaagagccatagtgggaaatagaacttagtacatttatggaattacattcttagacagaatgttttatacatgaagaaaaatgttttatgaaatggagtagaagaagcaaaagtagttttcattctatgactgtgtgatgccttatgctgcattgtaggctgggctgtcccagggagactgtgcccaagctactctcttgcttgacagacaagattggaaatgccttctgtgtccagagcacccgctaaattcttgtatttaatttacctgtgatcacaagctagttatttgaggtattaattaaatgcttctcaaaaggcctcactaatgaggctttttagctccctgctctctggcaatacaataagtcttatttaaatatgtctgcagagactcttctgtagagatggaaattcacgagcatggagtcaagtctctcagtgagagtgggtcctgctctgagagtgacagcactgccagggtcgagtcttcgggttctcctgtgtggctctgtactcttagttcaggaggttgtcgtagcccagcaaagtgagatgacttgtatctctgttctttatctcgattccacattaggaaacatgaatggggctagcagtacagctcgaaagttagaatgcttacttaaaatgcccatggccctgtgtccaatcccagaaccaccaaaagacaaacaaagacagagaacaacctaatactcttttctggtttgaaataggtgtaaaataaccttggtaattagattttaattcattgatgctcttttggtttgtacaggggaaagctagaagcgtttaggtttttgagtcaagtcaggtgcaggggggacatgcctacatcagctactctggaagctgaggcaggaagactgcttgagtacaagaccagcctgggtaatatcaaaaaaatattttttaaaatttacatgcacctgagagaaatataaaatctttatggatatcagggtcctataggatactatgctctgatctgactccatttcactcaaactaatattaagaatctgtttaggactttaaggtgttggactgtggtctaatgatgaatttttacttcatctgatatttttgtgtttttcaaatggtatctattcacaccctaagacttgaaggatgttctaggcagaaaatgagtggatgacagaggacagaaaactttgctgtcttgggatagtgactttccttctcttgtttctgcccaggtgacacactaaaggagagcccagacattaggatccaaaaagcagttcaacaaactttttttttcagtactgggggtggaacccagggccttacacagtgggtaagctctctactgctgtgccacacccagaggtctgacttctttaaaatccatgcccccaatttttttatggagttcgaggccaaagagattgttttatcaacttctactctggtttcttgctgtttgaattttttgttttggtttgtttttattttgcttgaccagttatcagccagtcagcctttgctggttgatggaaacatcatagtccagctaactggccatttatgttgagaacaagagaaaaagccttttccagccctgagcacaatgcagcttgtgaatttccaggcagtcctttgattgaaaataatgtctactgcttttgaagcatattattcctggcatcataagaagtcatttggttccttatacaccatttgctattagctctgtaatattcagtttttaaaagttaaggtatacaattatgttttcggtaagcttttcatggcctgcatggatattgcacaataccaagacatcgatggccaacatttgtagaatccgtaacttaacttactaaagtaatgagttttagcttgaaagttattgctgctctagattagcaaacaatttttaattaatttcttattaattctgaaattaattaaaatttcttattggcaatagggtagatgctatttaacatccaacttttacatctgtgggtctacataccccttccctccagagaagagctgacatggtaatccattggacatgcaaagttacaagcgtatttcattgtcctgcggggttttcttacttgtaacactgtataacctaaaatgtctattcgtgcctttgctttaaataattaaagtttctcgttttacaagaaaaaaaaaaaaaaaaaa

SEQ ID NO: 341 - DNA, 1077 bp, Mus musculus
atggctctaacaatgctgctcttgctggtggcggccgccctgaccctgatcgagacccgcgcgggccaacactcgctgcaatatttccacaccgctgtgtcccggcccggcctcggggagccctggttcatctctgtcggctacgtggacgacacgcagttcgtgcgcttcgacagcgatgcggaaaatccgaggatggagccgcgggcgcggtggatggagcaggaggggccggagtattgggagcgggagacacagatcgccaagggccatgagcagagtttccgagggagcctgaggaccgcacagagctactacaaccagagcaagggcggctctcacacactccagtggatgtatggctgtgacatggggtccgacgggcgcctcctccgcgggtacctgcagttcgcctatgaaggccgcgattacatcgccctgaacgaagacctgaaaacgtggacggcggtggacatggcggcacagatcacccgacgcaagtgggagcaggctggtattgcagagaaagaccaggcctacctggagggcacgtgcatgcagtcgctccgcagatacctgcagctcgggaaggagacgctgctgcgcacagatcccccaaaggcacatgtgacccatcaccccaggtcttatggtgctgtcaccctgaggtgctgggccctgggcttctaccctgctgacatcaccctgacttggcagttgaatggggaggagctgacccaggacatggagcttgtggagaccaggcctgcaggggatggaaccttccagaagtgggcatctgtggtggtgcctcttgggaaggagcagaattacacatgccatgtgaaccatgaggggctgcctgagccccttaccctgagatgggggagatgggagcctcctccatacactgtctccaacatggcgaccattgctgttgtggttgaccttggagctgtggccatcattggagctgtggtggcttttgtgatgaataggaggtgaaacacaggtggacaaggaggggactgtgctccagctccagtgatgggtcttgtccctcattctctagcatga

SEQ ID NO: 342 - DNA, 25839 bp, Mus musculus
atgtcttcctctgatgaagaaacgctcagtgagcgatcctgtcggagtgagaggtcatgtcggagtgagaggtcttaccggagtgagcggtcagggagcctgtctccttgtccccctggggacaccttgccctggaacctgccactgcatgagcagaagaagcggaaaagccaggattctgtgctggaccctgcagaacgtgccgtggtccgagtcgctggtaagaatgatcctcagcgtttgctagctggctgctgcagggttgagggagtctgggtcagtgtgcacctgcatggtgaggtggaagtctttggagaagccgactttagtcagattgcctttcgattgattgtcggttttcgtctgtttctggacaactctttgttcccgggcttctttgtggtcgtaccgttcccttcggcctcccgtatcagtcccggctggggctcgcccttgtcttggttctggagccgtgtggccttggctccggccaaccgcagccaggagaaggagttcgtgcaggcgtacgaggatgtgctggagcgctacaaaggaggaggagttgggctcgagggagacgctctcattcggtttcccggggcgagcttccctgcggtggctctccgggggtcgcccgcccgcccgcttttgtctccctgcctcttcggaggagtcgctcgggagcctaggacgccgagcatccggggggtcttggggggtcgggtgggcggcgtggccgaaataaagattggtctcggagctcggatttcagcccctgaaggctggcttgcgaagcagttcagcgagttaatgtctaatctccgccgagtgctcgcagagaaagttttgacaggccagcagggctgcgggctgcctttccctaaccgccctgagtggaaggcaggggactgggtgtgtgctcgagaggtgtgtcggcagaggaaatacctgtgcttcaggttgtgcttcctcctctgctgtagcgactcctgcgagtcaggggagagagacaatgagcgggaccgagtgcaaaagaaaacattcaccaagtgggtcaacaaacacttgatgaaggtccgcaagcacatcaatgatctctatgaagaccttcgggatggacacaacctgatctccctgttagaggtcctctcaggcatcaaactgcccagagagaagggcaggatgcgtttccacaggctgcagaatgtgcagatcgccctggacttcctaaagcagcggcaggtgaagctagtgaatatccgcaatgatgacatcacagatggcaatcccaagctaacgctgggcctgatctggaccattatcttgcacttccagaagagggttcggttcaaaaggaagtggagagggaagaaaatccttactccagaagcatctcacagggaggaagctttggaaggcactggagtcattgaagagactgaaaccctaacgaagttaacagcgaggctcccaaaggagcccggagtgggaggggcagagcaccccccatcagacattttcctgcccggagactcagctcccaactcaggggtgggcgatcaagggatgattgtgcaggtaaaggagagcttccaagcagagatccagactgctcaccttttgttggagaatgagtcatcagttgttggaggggcctgggattccctggaagagggtatgacagtcattgctcacctgcttgataacccagcagaaaggaactgtgagaagtctagtgatttatctgtcagtggcatcactgtgagcattttgccatcctcctctggctatggcagcgatgggctgcgcctgcatgggatccggcctgaagatacagaacctgaaaagacctccacacccttctcagaagaggatggcatatcgaagtggagtgtggtaagcagtaaggatcttggagtatttcaaacttacccctatatggggagtatctctgacatctacattagtggggaatcaggggatatgtcagccaaagagaaactactcttgtggactcagaaagtaacagctggttacacaggagtcaaatgcaccaacttttcttcctgctggagcgatgggaaaatgttcaacgcattgattcaccgatacaggcccgatctggtagacatggagagagtacaagtgcagagtaacagggagaacctggagcaggcctttgaagtggccgagaggctcggggtcacccgactgctagatgcagaagatgtggatgtgccatctccagatgagaagtctgtaatcacttacgtgtcttcaatttatgatgccttccccaaagtccccgagggaggagaagggatcagtgctacggaagtggactccagatggcaagaataccaaagccgagtggactcactcattccctggatcaggcagcatacgatcttgatgtcagataaatcttttccccagaaccctgttgaactaaaggcactttataaccaatatatacacttcaaagaaacggaaatactggccaaggagagagaaaaaggaagaatcaaagagttatataagttattagaggtgtggattgaatttggcagaattaagctgcctcaaggctaccaccctaaccacgtagaagaagaatgggggaaactcattgttgaaatgctagagcgagagaagtccctgcggccggctgtggagaggctagaattgctgctgcagattgcaaacaagatacagaatggtgctttgaactgtgaagaaaaactgacactagctaagaacacactgcaggctgatgctgcacacctggaatcaggacagccagtgcagtgtgagtcagatgtcattatgtacattcaagagtgtgagggtctcatcaggcagctgcaggtggatctccagatcctacgggatgaaaagtactaccagttagaagagcttgcctttagggtcatgcgcctgcaggatgagctggtcaccctgcgcttagagtgtacaaatctataccggaaaggccatttctcgtcacttgaattggttccgccctctactttaaccactactcacctgaaagcagaacccctgaacaagacgactcattcttcttctacctcctggtttcgaaaaccgatgacccggactgaacttgtatctatctcatcctctgaagacgaaggcaatcttcgatttgtatatgaactactctcttgggtagaagagatgcagatgaaactggagcgagcagagtggggtaatgacctgcctagtgtggagctgcagttggaaacacagcagcatatccataccagtgtggaagaactaggctcaagtgtcaaagaggctaggttgtacgagggaaagatgtcccagaatttccatactagctatgtcgagactcttggaaagttggagacacagtattgtaaattgaaggaaacttctagcttccgaatgaggcaccttcagagcctgcacaaatttgtctccagagccacagctgaactgatctggctgaatgggaaggaggaagaggaactagcatgtgattggagtgacagtaatcccaatatctcagccaagaaaacctacttctctcatttattctataaaattaaattcaatttgcaggagttgacaatggaactggaagggaaacaagatgtatttcgttctctacaagatacagcggaggtgttgtcacttgagaaccacccagctaagcaaacagtagaggcatatagtgctgctgtccagtcccagttgcaatggatgaagcagctgtgcttgtgtgttgaacaacatgtaaaagagaatgcagcttacttccagttcttcagtgatgcccgagacctggagtcatttctgagaaacctccaagactccatcaaacgaaaatatacctgcgaccgcagcaccagtctgtcccgcctggaggatctgcttcaggactccatggatgaaaaggagcagcttattcagtccaagagttccgttgccagtcttgttgggagatcaaaaaccattgttcagctaaagccacgcaatccagaccatgtgctgaagagcactttatctgtgaaggccatctgtgactaccggcagattgaggtgcgcatgcatcagataactatttgcaaaaatgatgaatgtgtgctggaagataattctcagaggaccaaatggaaggtgatcagccctacagggaacgaggcaatggttccatcagtttgctttctcattcccccaccgaataaggaggccattgaaatggccagcagggtggaacagtcttaccagaaggtgatggccctttggcaccagctacacattaacaccaaaagccttatctcctggaactacttgcgaaaggaccttgatacagtacagacctggagcttagaaaagcttcgttccttagcaccaggagagtgccaccaggttatgaaaaacctccaggcccactatgaagactttctacaggacagccatgactctgccctcttctctgtggccgatcgcttgcgaatagaggaggaggtggaagcttgtaaagcccacttccagcacctgatgaaatcactggagaatgaggacaaagaagagactttggccaaggtatacatctctgagctaaagaatatccgactactcctggaggagtgtgagcagagactgctcaaacaaattcagtctccagccagctccaagactgacagagatgccaggcaggacatcacattgaggattgcagagcaggagcacacacaggaggatttgcagcatttgagatctgacctggatgctatttctatgaaatgcaacgtctttctccagcagtctccatcaggttcaagtgccacaactctgcgctcagagctgaacctgatggtagagaagatggaccatgtctatggtctgtctactgtctatctgaataagttaaagacaattgatgttatagtccgtagcatgcaggatgctgagctgttggtcaaaggttatgagatcaagctgagtcaagaggaagcagtgccagcagacctctcagctctggagtcccatcggaccaccttacagcactggcttagtgatgtgaaggacaagaattcagtgttctcagtcctggatgaggaaatcactaaggccaagaaagtggcagaacagctccggcacccagcatcagagccaaacttggatttggagcgctatcaggagaaaggttctcagctacaggagcggtggcaccgtgtcattgcccagctggagacccggcaatctgaggtagaaagtatccaggaagttctgagagattaccgagcctgccatggaactctcatcaagtggattgaggaaaccactgcccagcaggaaatgatgaagcctggccaggcagaggatagtagagtgctgtcagagcagcttagtcagcagacggaactctttgctgaaattgagagaaatcagacaaagttggaccaatgtcaaaaattttcccagcagtactccactattgtgaaggactatgagttgcagcttatgacatataaagccttcgtggagtcacagcagaaatctccaggcaagcgccgccgcatgatttcctcttcagatgccatcacacaggagttcatggacttaaggactcgatacacagctttggtgacattaacaactcagcatgtaaaatatatcagtgatgctctccggcggttggaagaggaagagaaagtagtagaagaggaaaaacaagaacatgtggagaaggttaaagaccttttgggttgggtgtctactctggcaagaaatacacaaggaacaactacctcatctcacactagtgcatctgcagacattgagaaggccattttggagcagcaggttctggcagaagagttgacaaccaagaaagaacaagtttctgaggccattaaaacttcacagatcttcttagccaagcatggccataagctttcagaaggagagaaggaacagatctctgagcagttgcgtgtgctgaacaagacttaccatgacctttgtgatggttctgcaaaccaactccagcagctccaaagcgagttggctcagcagacggaacaaaagggttgcagagcagttgctggggtgattgacctaggcacagtggagatattccccatcttcagagccatgcaaaagggcctcattgaccaagacacaggccttgtgctcctggaatcccagattatcatgtctggcctcattgatcccgagaacagtgaaaagctctccttggaagagggtctcaccagaaatttcattaaccttccaatatatcaacagctcttgggactaagggattctctgtctttagtaagcaggcttacagggaccctaggctccctttctgtggtggaagcaattgaaaagaaaataatcagtgagagacttggactgaaagtcttagaagttcacctggcaactggaggtttcagtctcccccctagtgagaactgtattaatctggaagaagcttttcatcaaggcttcattgcatcaagtcttcactcagaattacagtctcacctgagatcatccaagaatttaatagaccccaatacagctgaaaaagttggcttgctggacctgatgcagagatgtatcatccatcaagagtcagggttgaaattgttgcctgtcaagcagttggcagggggaatggtgagcttgaagtcaggtcggaaagttagcattttccgtgctgttcaggaagggctgatagacaggcaagtcactgtccggctgctggaagcccagctatttgctggtggcatagtagatccaagaacaggacacagacttacagtggaagaggctgtgagacataatttgattgaccaagatatggcttgcgctattctcataaggcagcttcagacaggaggcatcattgacactgtcacaggggataggatgactattgatgaggcagtgaccaataatctagtagctgctaagattgctcttgtaattctggaatccctctggtcatttatgggcttactgttgcctgaatctggagagatcctcccaattacagatgctctagagcaaggtattgtatctactgaattagcacataaaattctccataaccgacagcaaattgaggctctttttctaccaacactcacagagatttggtcctgggaaaaagcaacagagagtggtatcctagataaagatcttgtcaataacttaaggtcagtttgtatccctgacatgatgccccacatacaactagcagactctgcagaacaaagcaaggtaggctttgctgctggtaaaccacctgtgtcaggcccaagagaggaaggatccagccatggagagaagctgctgtttcagctgatgactcacagctacattcatgcacacactggacagaggctgcttttgctggatcaagagctggtggagatgctaacatccagagatgactgtcaagtaattcttccagaagtatttgaaattcagcatcaaaggctcaacacttctgaggcattacaagaactgtatactgggaccatctcccaaatttccagtgctaagcatcctaggaagccctgtgaatcccaatttctttcacagaacaaagactatcccagtcaggaaaactgtactgaagcaaaaggtgaaaggtctgttgtaggtatagagtgctctcctgcagagagccctgaaagggagcttttcctcaaagaacaagaagccattattgaaaatgttggcagtttgaaggtcatcaataaagtcaagttaaagctacaaagaccattgttaggaagtagaaaggaagagcaagcagaaacattgagggaggaaaatatcagcggagaccccctccttgtagaatgtcctgaggaatctgaaggtaaagacctttctactgagaagtcaaaatgccaaactcccacaaagtgttcgtttacatgtcacaaagaacaagtgaagaccatcaaagacattccaagtgaaactggaacatcactcataaagtctcaaaatcaaatgtcacaatttcaggtagatacttctgtaggtttgagatcagagtttaagtcagaacatgatatgaatgttaattctttggagaaagagttaaaggaagaacttttggttaaggatggccacaaacaaagccaagaaggacagagtgttgcagatggtcagacggtggcgttagaaaagactgatactgaagataatgctgatgagcctgccttgttgcatagttctccttttgaagatgctaccttaagcacactatctgcacagctacaggatggtggtatctttaatgaagaaacaggccagaaactcttactaaatgaagcaatagcccaaggccttgtgtctagccacactgctgtcaaacttatggggaaattgaacatgtttcggggcttctttgactcccagacctgtgagtctttgacgactgaagaagtcattgatgaaggtctaatggatgagaaattattatataatgttcttatgtcagacaaagctataagtggtatcttagaccccaggacccactctctgtgctctgtaaaggaggctgtggcagctgggctgcttgacaaggagacagccacaaggattttagagggacaggtgataactggtggaattgttgacctgaaacgaggcaaaaagctttcggtaactttggcctcaaatcttggtttggtagacactgctgaccagacagaacttatcaatctggaaaaggctactaaaggcagaggtgctgaaaaggcagttaaagagagattaatcgaactacaaatggaaacagcaggacttatggaccctgaaagtaaagcaccgttaacagttttgcagtccattgatagaggtattctagagagagaagcagctgtttatctgttgactaagcaagtacttgatggtggtatcattcatcatatatctggcttgagactttctgttgataatgcctttaaacatggcttgattggtgaagatatggccaggcagctcagaaaagttgagaactttatccactatcaatttttccatcctcaaacaaaggaagccctttccttctcagaagccataaaattagatcttgtttctccagacttgaaaagagaaatccaagagatccaggactttagtgggaacttgggggatttcatttatggccagaaattgaccttggcaaaaactaacaaagaagaatccttagctaataaaacagaattgccttcaggggtgatgcatggggttatagatcctgagaactgcacgattattccttactcagaattggtaaagaaatgtaggattgacactgaatctggatggcgatatcttgaagtaattccgttctctgatattaaagacgaggcgggcaacaacgtgctcacgccgccggaagcaattcagctcgggaaagtagactttgcttctgcattgaaggttttggaagctcaggcgaacactggtggaatcatagacatggccacaggaaaaagagtgacattggcatcagctttggaaaagaaactgttagatgaaaacatggccaggattattgcatctcaccagatgttaagtggaggaattattgatatatacagtgatcaaagagtgactttaaacgatgctgtcgagaaaagactgattagccctgaactggcagctatgatccaagtagatcccttagcagagcaaggtgggactggaaaactgcccacaaggacagtgcagagtgagaatatacggcagcatgatgctgtcattccggccatttctgaaatcagggaggaaatggcactgtcgctgccatgttctgtagtgaaggtggatgggaagatacctaaggaaaagcacaaagagatccttggagatgaacaaggccccttcatggccatacccagtgggaaggggattgaaggtgtaaacccagagccttgcagagcaactcaggaacttgacagggaattaaaagatctgtccactgtggtgagtcaggaattggagtgtgtggatcggattgttatcagtcagccacaagaagttcctgctcagctgttgaaggcattagagaaagatgccaaaaatcttcagaagtctctagactctgttagtgactcttggagttccagattcctccacctccagagtgctgtggaagtaaaaaaggccacagtgttaaatcggcacaaggaactgcaaggcaaacttcaagatctgagagcctgggtcggcagagccagtcttactctgaacagcaagggctgtgacactgaaactgacgctgacagcctgagtcacactctccaaccatacaaggatatgaaacaatctatggctgaaaggaaatctcagctggatgcccttgctttggatattcagctctttatatctgagcacccacaggatctgtctcttcagcagaatcaggagatgctgcagtttctgagtgaattacagaggtccttccagggccttgtggaacacactgcagctcagaaagatgtggtgcagggccatcttcagcaagtccagcaagaagttcaggtcaagactctgcagaaacaacaagacacctgccataagaagctggaggatctttgcaactgggtgggacaggcagaaagagcactggagaggcaccagggcggagcctctcggcaagagctccctgctctgcagcagaaccaaagtgacttgaaggatttgcagggtgacattcagagtcattccacctcatttgccactgctgtcaaagacattgaagggttcctggaagagaaccagaccaagctgagcccccaggagctgacagctcttcgagaaaaacttcatcaggcaaaggagcaatatgaggttctccaggaacggacacgggtggctcagaaagagctggaggaagcagtgacatcagccttacaacaggagacagagaaggtagctggcctgctactggtttttcaaagacacattggagcagtctttagagttacagaagaggtctttaggatggagtgcctaagagttctcactggtattcctctggatttcagagtaaagcagcgacagagctggcagagaacaagaggaagatcgatgctctcttggattgggtggcttctgtggggtcatctgagagaaagccacaggctagccttccaggaatggagcagttctctggagcttgctttggaaaaacaaaccttagctgccactgatggtcatgtagatgtgaaccaggtaccagagacactggacaggcagtatgagctaatgaaggctcgtcaccaagaattgctgtctcagcagcagaatttcattgtggccacccagtcagttcagtccttcctggaccaacacagtcacaatctcacacctgaggagcgacagaagcttcaggagaagctgggtgagcttaaggagcaatatgcagcctcccttgcccggtcagaggcagagctgaagcagacgcaggctctacgagatgaactgcagaagttcctgcaagaccacaaggaatttgaaaactggctacaacaatctgagaatgagctggatagtatgcataagggaggcagcagtcctgaagctctgaactccttgctaaagcggcaaggaagcttctctgaggatgtcatttcccacaaaggagacttgagatttgtgactatctcagggcagaaagtcttagaaacagaaaacaattttgaggaaggccaagagccatcagctaccagaaacttagtgaatgaaaaactgaaggatgcaacagaaagatacaccactctccactctaagtgtatacgattgggctctcatctgagcatgttgctaggccagtatcagcaattccagagcagcgctgacagcctgcaggcctgggtgttgacttgtgaggccagcgtggggaagcttctctcagacacagttgcctctgaccccggagtcctgcaacagcagcttgcaacaacaaagcagcagttacaggaagaattggctgaacaccaagtacctgtagaaaagcttcaaaaagcagctcatgacctactggacattgaaggagagccagccctggactgtaggcctattcaagaaactacagattccatatccagccgcttccagaacctctcttgtagcttggatgagcggtctgctttgctgcagaaggcaattgctcagtctcagagtgttcaggaaagtatggagagcctgctgcagtccataagggaagttgaacaaaacctagaaagggatcaggtggcatcactctcatcaggagtcatccaagaagccttggccaacaacatgaaactgaagcaagacattgctagacaaaagagcagcttggaagccacccatgacatggtcactcgattcatggagacagctgacagcaactcagcctcagtgctgcagggcaaactggcagagctgagccagcgcttccaacagctccagctccagcagcaagaaaaggagagcaacctaaagaagctcctgccccaggctgagatgtttgagcagctctccaacaagctgcagcagttcatggaaaacaaaagccgactgctggcctctgggaaccagccagatcaagatattgcacatttttcccagcagatccaggagctcactttggcaatggaagaccagaaggagaacctagatactctggagcacctggttactacactgggctcctgtggctttgccctggacctatctcagcatcaagacaagatacagaaccttaagaaggattttacagagctgcagaagacagttcaagaaagagagaaagatgcatccacttgccaggagcagttggatgaattccggaaactgattagaaccttccagaaatggctgaaagaaactgaagggaatgttcctcctgcaaagactttcgtgagtgctaaggaattagaaaagcagattgaacacttgaaggatcttatatctgactgggaaagtaaaggagccctgctgggagaaatcaacgccaagggcactgccttagaaagtctcatcatggacatcacagctcctgattcccaagccaaaacaggttccatactaccccctgtaggaagctctgtaggcagtgtaaacggataccacacctgcaaagatcttacagagattcagtgtgacatgtttgatgtaaattcgaagtatgagaaactgtgggaagtgctgcgagaacgacaggaaagccttcagactgtcttcagcagaatggaggaggttcaaaaggaggcgagctctgtattacagtggttagaatcaaaagaagaagtcctgaaagccatggatgccactttgtctccaaccaagacagaaacagtaaaagcccaagcagaatctaacaaggcttttctggctgaattggaacagaattcccctaaaattcagaaagtaaaggaagccctggctggattactgaagacctatcccaactcacaagaagcagaaaactggaagaaaatgcaagaggacctcaattcccgatgggaaaaggccaccgaggttactgtggctcgccaaaagcagctagaggaatctgcaagccacctggcctgcttccaggctgcagagtcccaactccgcccctggctgatggagaaggagctgatgatgggagttcttggtcccttgtctattgaccccaacatgttgaatgcccagaagcagcaggtccagtttatgctgaaggaatttgaagcacgaaggcagcagcatgagcagctgaacgaggcagctcagggcatcctaacgggtcctggagatatgtctccatctgccagccaagtacacaaagatctgcaaagcatcagtcagaagtgggttgagctcactgacaagctcaactcccgttccagccaaattgaccaagctattgttaaaagtacccaataccaagacctgctccaggacttatcagaaaaggtgaaggccattggacagcgactgagtggccagtcagccatcagcacccaacctgaagctgtaaagcaacagctagaggagaccagtgagattcggtctgatttgggacaattagacaatgagattaaggaggctcagacgctgtgccaagaactctcactgctcattggtgagcagtacctcaaggatgagctgaagaagcgtttggagacagtcgccctgccgctccaaggcttagaagaccttgcagccgaccgcatgaacagacttcaggcagctcttgccagcacccagcaattccagcaaatgtttgatgagctgaggacctggttagatgagaaacaaagccaacaagcaaaaaactgcccaatttctgcaaaattggaacggctccaatgtcagctacaagagaatgaagagtttcaaaagaaccttaatcaacacagtggttcctatgaggtgattgtggctgagggggaggctctgctgctttctgtgccccctggagaagagaaaaagactttacaaaaccagttggttgaactcagaagccactgggaagatcttagtaaaaaaactgcaaatcgacagtctaggctcaaggactgtatgcagaaagctcagaagtatcaggggcatgtggaggaccttgtgccctggatagacgagtgcaagtccaagatgtctgagctacaggttaccctggatccagtgcaactggagtccagcctcttaaggtccaaggctatgctgaatgaggcagagaagcgccgctccctgctggaaatactgaatagtgctgctgacattctgatcaattcttcagaaatagatgaagatgagatccgagatgagaaggctgggctcaaccagaacatggatgccataactgaggagctacaggccaaaacgagctctctagaagaaatgactcagaggctcaaggagttccaggaaagcttcaagaatattgaaaagaaagttgaaggagccaaacaccagcttgaaatctttgatgccctgggctctcaagcctgtagtaacaagaatctggagaagctaaaggctcagcaagaagtgctgcaggccttagaacctcaggtagactacctgaggaacttcactcagggactcgtagaagatgctccagatggatcggatgcttccccacttgtacatcaagctgaggttgcacagcaggagttcttagaagtgaagcaaagagtgagcagtagctgcctgaccatggaaaacaagctagaggggattgggcagttccactgtcgagtccgagaaatgttttctcaattggctgacctggatgatgagctagatggcatgggagccattggcagagacacggatagcctccagtcacaaattgaggacgtacggctcttccttaacaaaatccaagccctcagatttgacatagaggactctgaagcagagtgtcgaaaaatgttggaggaagaggggacgttagacttactgggtctcaagagggagctagaagcccttaataagcagtgtggtaaactgacagagcgagggaaagttcgccaggagcagctagagctgacgttgggccgagtagaggacttctataggaaactgaaagcgctcaatgatgccgccacagctgcagaggaaggagaagcgcttcagtggattgtgggaactgaagtggatgtcatcaaccagcaactagcagattttaaaatggggcccccgagtggccctagccactaccggctggtagtgggggcggcgggggcgccccttctgggttcgcccttgggctgggctcccatcccgccggttggaaagaagcgggggcggaggggccgggccagcgttgtgagggcggggctttcctttgtcaggggatttgcccggcatgaccaggactgcccctctcctctcaccctcgcaggcggggacactattactcccgtgggtgaggagggaaagggggaggagatccgcccgccacccgagcacttccagccagcggcgtgtgagcgggccgcgcggcgtgagagaggcgggctcgcccccctcgtgcggccggagcggagccttttgttcccggccagaagtttgcatgccgggaccgtgacagctgcgggcggggaggacggctgcagggccggcggcgtggtggagaaaagaggcgactgcttgtcatgcagcccacgacgcggcggctgggggccggggacctgcagtggccggggaggcggcgcccacaggacacgggacttactgctgccggagggacaaactaacttcctgagcgctagacccaaggccggcccgccgggagccacctgcaaggttgcgcggtctatatacgatacaatgaggataaatgaacagattgaccaggggtcaaaacttaatcagacgtcaaaaagcaccatggagaagatggaaggaagtaccatatccagcaatggtacattaggagcatcatctaatgtttttgaagctagaggaccagaaggcaagaagctggatgagaggataatatttgatgcattaaagctaagcagtgatgtgcagaagtcagcacccgtgccacccagacgtcggccaaatgcagaacgcaaagataatgttaacaggagatcgtggaagtccttcatgccacccaacttcccagaatttgcagaaaggatggaggcttctctcagtgaagtatcagaagctggagcttcaaatccttccttgcaagagaaaaaagaatccagttctgcattgacagaaagttctggtcactttgaccacagggaacctcagtctgagtccgttactttggaacacatgtccaaatctgtagatattccagaagtgcaaaatgtaaaaaatttgagagactgccaggacttcaaattccaacagcacagtgagagctctccccatgaattccagcctctgggctcagaagctgcagcagcaagtggtaacacagatgaaatgcaggagcacagattctcaagtgcaacctggcccagggccatgaaaagttcctccaagggaggcttcagtgagaagcagtatccccttggggacactgcctgtgcagtggaactaccacctctctctccttgcttgagtgaagagctgttggatccagaattgcatatgcttataacacctagcctgagagaaaaaacagagtctgagttaaaatttgaggaggatgagcgatggatcatgatggaggcagaggaggagtgggaggaagagaaattgtcagaggaaagaaagagtcttgttacaaatgaagagactagtttggcagatccccttgaagaaagtgaccaagcaaactcagtaccagcagtagaggatgggtcggatcgtgtggctgtctctggaacttctgaccacctcgctcttcatcagatgtgctgctctgttgacctgcagccaactagggatcagcttgcttctgtccccaggggttctccccctgactgcacctgtgtgcctgcaggtgacactgttatcagtgaggtgaaaaacagacctgatcaggggctagagggtctgacttcagggctccagtgccctgttgaagcagagcagctctctgacacagattctgtgcaaatgtttcttgaacttgagaaggaatgtttatgtgaagaaggagtaacttcttcagctgagctgctgagtcaggcctcttctgaagggctggccccaacccaggatgcagaagattcacttttaattagtcattttccaggagctgccttagaacaggaacagcatgtgggttttctaagtgtgaggataaaggaccctgacactggattagatggtgaatattgcaatgccctggattcttctcaggtgcctaaagctgttgaactttgtgctcagcctgatagtgggagggatgcctccactattagcaaggagtgtgaaaaagtgccttttagccccaagattggtggagaatttaagcttctggctgatctggagccacatagcgagctggacacagggggattgctgaactctaatctcagagcctcttgtgaagaaaacctgccagtctttattgcctctgagctagccaaagaaaatggcaatttgtcccaggtagactgcagtcagactgaggggaatgtagaggagtatatggaaaggatccctctcagttttgcttttaactatgaacaagatgttacctcaggacctgaagtagaggtgttctcatctgattcaaatttattaactgatgagattcatttagaaagtggaaaaggagctctaattagtcaagaagatagcaatctggcatctttgggaaatgtagacctttgtgaattgtccatggagaaagtttgtgataaggatggagaaacaaaagagccaggttgtcaagggaagcttttagggaatggagctccagcacagtttcctacagacttccagaggaggtcttctgagtcagaggttcttagtctgcacctgctggctggagaactgagactcaataaagctggagcagaaaccatgagtgatagagaacctcagctgagtatggctttatcacaggaaggggagctagaaatgagagatttagattcaaccctgaacatctttccggaggaacaaatcagcaaagccagtaacactgtgccagggttagaagaatggatatccagccaacagaggcctgtcccagctgctgtagtacccatggtagaaaatgccctggatgctgtaacaccgatgccaggagaggatatccccgctgtagcattgactgcctcggaggggcctgctgccaatgcctctgcctcagacggaactgctgcagctactccaatagtgcccatcccagaggaagatatcccaggagcttcggtggttatcttagtggaggatgttatgactgctgcaatatcagccccagaacaagctgcagcctcatctggtgcagtgcctccagtggagactgttacagtgcccatcatagacgaggatgttacctcagaggagcctgacactcaagcagctgaaatgttcctcccagaggaacctgccataccaactcctgcagggcccaccgcagaggagccagatactccaacagttccagtatctactgcagaggagcctagcatgcctcctcctgcagggcctacaccagaggagtctgctgccccaactctcaaagaacctaccccagagaagcctgatactcaagtgctgtttcagaaagaccaagtggatcctcttcaggtgaaattgcagcaggtgaatggacttggccagggattaattcagagtgcaggaaaaaactgtgatgtgcagggtttagaacatgatatggatgaaattaatactcgatggaatacactgaataaaaaggttgcacaaagaattgcacaactgcaggaggctctgttacattgtgggaaatttcaagatgccttagagcctttgctcagctggttgacagatactgaggagctcatagccaatcagaagcctccatctgctgagtataaagtggtgaaagcacagatccaagaacagaagttgctccagcgactcctagatgatcgaaaggccacagtggatatgcttcaagcagaaggaggcagaatagcccagtcagctgagctggctgatagagagaaaatcactgggcagctggagagtcttgaacgtagatggactgatctcctcagcaaggcagcagccaggcaaaaacagctggaagatatcttggttctggctaaacaattccatgagacagctgagcctatttctgacttcttatctgtcacagagaaaaagcttgctaactcggaacctgttggcactcagactgccaaaatacaccagcagattattcgtcacaaggctctagaggaagaaatagaaaaccatgcaacagatgtgcaccaggcagttaaaattgggcagtccctctcctccctgacatgtccggcagagcagggcatcatgtcagaaaagctagactcattgcaggcccgatacagtgaaattcaagaccggtgctgtcggaaagcatccctgctcgagcaggccctgttcaatgctaggctgttcggggaggatgaggtggaggtgctcaactggctggctgaggttgaggacaagctcagtacagtgttcgtaaaggattacagacaggatgtcctgcagaaacagcatgccgaccacctggctttaaatgaagagattattaatagaaagaagaatgtagatcaagcaataaaaaatggcgaggaggtactgcttatccaggagaagctggatgggataaagacccgctatgcggacatcactctcactagctccaaggccctcagaactttagaacaagcccggcagctggccaccaagttccactctacatatgaggaactaactgggtggctgagggaggcggaggaggagctggcagccagtggaggacagtctcccacaggggagcaaataccccagtttcagcaaagacagaaggaactgaagaaggaggtcatggaacacaggctggtgttggacacagtgaatgaggtgagccatgctctcctagagctggtgccttggagagccagagaaggactggataaacttgtgtctgatgccaacgagcagtacaaactgatcagtgacactgttggacaaagggtagatgaaattgatgctgctattcagagatcacaacagtacgagcaggctgctgatgcagaactagcttgggttgctgaaaccaagcggaagctgatggctctcggtccaattcgtctagaacaagaccagactactgctcagctgcaggtgcagaaggctttctccattgacatcattcgacacaaagattcaatggatgagctcttcagtcaccgtggggaaatcttcagcacatgtggagaggagcagaaagctgtactgcaggagaaaaccgagtgcctaatacagcaatatgaagctgttagcctgcttaactcagagcgctatgctcgcctagagcgagcacaggtcttagtgaaccagttttgggaaacatacgaagagctcagcccctgggctgaggaaacactggcgttaatagcacagctgcctcctccagctgtggatcatgagcagctcagacagcagcaggaagagatgaggcaactaagggaatccattgctgaacacaaacctcatattgataagatactaaaaataggtccacaactaaaggagctaaaccctgaggaagggaaaatggttgaagaaaaataccagaaagcagaaaacatgtatgcccaaataaaagatgaggtgcgccagcgtgccctggctctggatgaggctgtgtcccagtctgctcagtttcatgataaaattgaacccatgttggagaccctggagaacctgtcctctcgcctgcgaatgcctcccctgattcctgctgaagtcgacaagatcagagagtgcatcagtgacaataaaagtgccaccgtggagctggagaaactgcagccgtcctttgaagccctgaagcggcggggagaggaactcattggaagatcgcagggagcagacaaggatctggctgcaaaagaaatccaggacaagctggatcaaatggtgttcttctgggaggacatcaaagcacggtctgaagagcgagaaattaaattccttgatgtccttgaattagcggagaagttctggtatgacatggcagctctcctgaccaccatcaaagacacccaggatattgttcatgacttagaaagccctggtattgacccatccatcatcaagcaacaggttgaagctgctgagactattaaggaggagacagatggtctgcatgaggagttggagttcattagaatccttggagcagatttgatttttgcctgtggagaaaccgagaagcctgaagtgaagaagagcattgatgagatgaataatgcttgggagaacttaaataaaacgtggaaagaaaggctggaaaaactcgaggatgccatgcaggctgctgtgcagtatcaggacactctccaggctatgtttgactggctagataacactgtgatcaagctctgcaccatgcccccagtgggcacagacctcaacactgtcaaagatcagttaaatgagatgaaggagttcaaagtagaagtttaccaacagcaaattgagatggaaaaactcaatcaccagggtgaattgatgttaaaaaaagctaccgatgaaactgacagagatattatacgagaaccactgacagaactcaagcacctctgggagaatctgggtgagaagattgcccatagacagcataagctagaaggtgctctcttggccctgggccagttccaacatgccttagaggaactaatgagctggctaacacacactgaagagctgctggatgctcaaagaccgataagtggagacccaaaagtcattgaagttgagcttgcaaagcaccatgttctaaaaaatgatgttttggctcatcaagccacggtggcaacagtcaacaaagccggcagtgaactcctggagtctagcgctggagatgacgctagcagcctgagaagccgcctggagaccatgaaccagtgctgggaatcggtgctgcagaagacagaggagagggagcaacagctgcagtccacgctgcagcaggcccagggtttccacagtgaaattgaagatttcctcttagaactcaatagaatggagaaccaactttctgcatctaaacctacaggaggacttcctgagactgctagagaacagcttgatacacatatggaactacattcccagctgagagccaaggaagagatttacaatcagttgcttgacaagggcaggcttatgctcctcagccgtggtgactctgggtctggctcaaaaacagagcagagtgtagcgctcttggaacagaagtggcatgcggtcagcagtaaggtggaagagagaaagtcaaagcttgaagaggccctcagcctggcaacagaattccagaattccttgcaagaatttatcaactggcttactctagcagagcagagtttaaacatcgcctctcctcccagcctgattttgaacactgttctttcccagatagaagagcacaaggtttttgctaatgaagtaaatgatcatcgagaccagatcattgaactggatcaaacagggaaccagttgaagttccttagtcagaaacaggatgttgtcttgatcaagaatttgttggttagtgtgcagtctcggtgggagaaggttgtgcagcggtctattgaaaggggtcggtcactggatgacgccaggaagcgggcaaagcaattccatgaagcttggaaaaaactgattgactggctagaagacgcagagagtcatctggactcagaactggagatttccaatgacccagacaaaatcaaacttcagctttctaaacataaggaatttcagaaaactcttggtggcaaacagcctgtgtatgataccacaatcagaactggcagagcactgaaagaaaagactttgcttgctggtgatactcagaaacttgacaacttgctaggagaagtcagagacaaatgggatactgtctgtggcaagtctgtagagcgacagcacaagttggaagaagccttactgttttcaggccagttcatggatgctttgcaggctttagttgactggttgtacaaggtggagccacagttggctgaggaccagcctgtacatggggaccttgacctcgtcatgaacctcatggatgcccataaggttttccaaaaagaactgggaaagagaaccggcacagttcaggtcctgaaacgatcaggcagagaactgattgagggcagcagagatgacaccacgtgggtaaaggggcagctccaggagcttagcactcgctgggacacggtgtgtaaactctctgtttccaagcaaagccggcttgagcaagccttaaaacaggcagaagagtttcgggacacggtccatatgctgttggagtggctttctgaagcagaacaaacacttcgctttcgaggagcccttcctgatgacacggaggccctacaatctctcattgacacccataaggaattcatgaagaaagtagaagaaaagcgggtagatgtgaacacagcagtggcgatgggagaggccatcctggctgtctgccatcccgactgcatcacgaccatcaagcactggatcaccatcatcagagctcgattcgaggaggtcctgacgtgggcaaagcagcaccaacagcgcctggaaactgctctgtcagaactagtggctaatgctgagctcctggaagaacttctggcatggatccagtgggctgagaccaccctaatccagcgggatcaggagcccatccctcagaacatagacagagttaaagctcttatcactgagcatcagtcatttatggaggagatgacacgcaaacaacctgacgtggacagggtcaccaagacatataagaggaagagtgtagaacccacccatgcacctttcatggagaaatcccgcagtggtagcagaaagtccttgaatcaacccacacctccccccatgccaatcctctcacagtctgaagcaaaaaacccacgaatcaaccagctctctgcccggtggcagcaggtgtggctgttagccctggagcgtcagcggaagctgaatgatgccttggacagactggaggagttgaaagaatttgccaactttgactttgatgtctggaggaaaaagtatatgcgttggatgaatcataaaaaatctcgagtcatggatttcttccggcgtattgacaaggaccaggatgggaagataacacgtcaggagtttatcgatggcattttagcatctaagttcccaaccaccaagttagagatgacagctgtggccgacatttttgacagagatggggatggctacattgactactatgaatttgtggctgccttacatcccaacaaggatgcctatcggccaacaactgatgcagataagattgaagatgaggtcacaagacaagtggctcagtgcaagtgtgcaaaaagattccaagtggaacagattggagagaataaataccggtttggagattctcagcagttgcggctggtccgtattctgcgcagcactgtgatggtccgagttggtggaggatggatggccctggacgagtttctagtgaaaaatgacccctgccgagcacgaggcagaactaacatagaacttagagagaaattcatcctgccagaaggggcatctcaggggatgactccattccggtcacggggtcgaagatccaaaccatcttcccgggcagcttctcccacccgctccagctcaagtgctagtcagagtaaccacagctgtacatccatgccttcttctccagccaccccagccagcgggaccaaggttatttcgtcatcaggcagcaagctgaagcgaccgacaccagcttttcactccagccgaacatcccttgctggtgacaccagcaacagctcttccccagcctccacaggtgccaaagccaaccgggcagaccctaagaagtctgccagccgtcctgggagtcgggctggcagtcgggccggcagtcgagccagcagccggcgaggaagcgacgcctctgactttgaccttctagagacgcagtcggcttgctcagacacttcagagagcagtgctgccgggggccagggcagctccagacgagggctcaccaaaccgtccaaaatcccaaccatgtctaagaagaccaccactgcctcccccaggactccaggtcccaagcgataa

SEQ ID NO: 343 - DNA, 2889 bp, Mus musculus
gggtcgcctaggtgagcgtgccgaggcgacaactgcagacctgccagagcccgttgagattcggtcactgatgtggatgaagtgagaagaactctatgccgtgggagcggagcgcaccgtggtggtaaccagcgtggcgagcttagctgaaagcggctcccgcccacacttggccaggctcagaggacgctgagcctgggagtttcctgaagacatctggccccacttcggaagtgtcctgccaaagcaagtgctaagacaggcaggtcccataggagcagacctggctgagcagcaaaggtgaatgaagcccccaactccacacttgtgctgtgaagtcctctctggccacacgggtctccagcagcctctgaacttcagatcagtagttatagtaaaagcagccaagagaccgtccggtctaacagatttcacgtgtcaccatgctgtgctctctgttcctgctgctgctggccgtgggcagagtgcagacgactcggccgtgtttccctggctgccagtgtgaagaagagacattcggcctctttgacagtttcagcctgatccgtgtggactgcagcagcctgggcccccacattgtgcctgtgcccatccctttggatacagcccacctggacctgtcttccaaccggctagaaaccgtgaatgagtcagtcttggcagggccaggctataccacactggctggcctggatctcagttacaacctgctcaccagcatcatgccctctgccttctcccgactgcgctacctggagtcacttgacctcagccacaatggcctggcagccctgccggcagagattttcaccagctcccccttgagtgacatcaatctgagccataaccgactacgagaggtctcgatatctgccttcaccacccacagccagggccgggcactgcacgtggacctatcccacaatcttatccatcgcctgcttccccatccagcccgggccagcctgcctgcacctaccattcagagcctgaacctgtcctggaaccgattccgagctgtgcccgatctccgagacctacccctgcgttacctgagcctggatgggaaccctctggctaccatcaacccagatgccttcatggggctggcaggcctcacccacctgtcactggccagcctgcagggcatcctccatctaccaccccacggcttccgggagctcccaggccttcaggtcctggacttgtcaggcaaccccaagctcaagtgggcaggagctgaggtgttttcaggcctgggtttgctgcaggaactagacctgtcaggctccagcttggtgcccctgcctgagatgctgctgcatcacctccctgctttacaaagtgtcagcgtaggccaggatgtgcagtgccggcgcctggtgcgggagggcgcctaccaccggcagcctggctccagccctaaggtagtcctacactgtggagacacccaggaatctgctgccaggggcccagacattttgtgacgaatggtgtggcctgaggccacttgacagactgctgcctgggcttgctcaggtccccactaatattttaatgtgccaatgcctgtggagagtctacaggcctaagtggcggccatctcagtaaagatatgggccaaggatagtttttgtacctggggcctatacccaataacaaaatctgccggtttgtcacagtggctcacctcccagaactctgagcaaagggactgtgatgccaaaccagactttggtcccttcctgagccctgctccagttgtccctaagtgccttcccttttgtctggactgacctgacccatgatgtttggactacatgtaggtgagcgcccgcattgcaaagctgactcaggtccactgggctgaaggtcccttggagcccagtgtctagtcacacctttttgctctgggcccatgaggcctacttcttccttttctcatggaatcctgggtagaatcttaataatagaaggacttagagagaaaatcaaatccaccctccttgtggggaagatggtaatatgggaccaagagcagcaaacgtgctcacctggtgtcttggagcccagcctcctgctgaggttgggggctctgccatccctcccctgctgggtaccctgttaccattcattgtctgtgctgtttcccattgtgcccagcagtagcaacaacaagatcacatgggtggggaccctaggtccggtggccagcttatggcaggagcaaagtcagtccccctttcagagcctcaggaagcttggaacacctcagtcacaagcctgtcagtttcttcctctgggatgggagtcccgcagcatcgagactggaaacgtacacatttcccccagggaccctgtcttacgatgcttttctacgtcaatgcaattgtggccatctggccacaagctccaagggacttacaagctcaagggccagagcccagagacccattttcccctccaaggagtggggcaggaagggtctcccaggcacgctgtgctcacccccagggccacatctcagctctccagccctggattctttcctgtcttcattttatgagttgttgccctttttttttttttttttttttttttaatgaactgtcacttttaaccccctcctctgctggccgggggatggaaaggaagataaatgttatttgttcacttttgtaagactctgttctgggtgtgggccaggaggtcttagaaagaagctggctgtcagtgaccatgtgggcattgaggctggtcccagagatgctcgaaagtcagtgaaagctatgccttctcatgctagcccagcccagcccaccctgcgactggttcttggtttaataaacacatgtaagagttctttcc

SEQ ID NO: 344 - DNA, 1415 bp, Mus musculus
gcagccggcgagaccgcgcactggccggagcggcgcgcctggggcgggaggagcggtgttcctccagtcctcatccttagagctcgcccggcctgttggagagggcacagggcagcggagggcgattggccgcgacgagccagcactgagagagcaggcgcctgaggcgacagatcggcggccactggcccagtaccgggtccgtgaagggaaaagtccgggacacgattgccctcggtggcagggcggcccaatccaaactgccctggtccctgctcccgtcagtctaagaggctcgcagtcgcttggggcggccgccatcccgagggcggggctctgggaattgggtatctggaccgccgcggtctgttcctcccgccactcgcaccaggtggtgacaccatccagccggtgaccatgttcgacaagacgcggctgccgtacgtggccctcgatgtgatttgcgtgttgctggctgccatgcctatgactattttaaaattgggcaaagtatatccatttcagaggggctttttctgtactgacaacagcgtgaagtacccgtaccatgacagtaccatcccgtcccgtatactcgccatactggggcttggcttacccattttctctatgagtattggagaatctctgtctgtttactttaatgtcttgcattcgaattcctttgtcggcaatccctacatagccaccatttacaaagccgtcggagcctttttgttcggagtctcagctagtcagtccttgactgacatcgctaagtatactataggcagtttgcggccgcacttcttggctatctgtaacccagactggtcaaaaatcaactgcagtgatggctatattgaggactacatatgtcaagggaatgaagagaaagtcaaggagggcaggttgtctttctactcgggacactcttcattctctatgtactgcatgctgtttgtcgcactttatcttcaagccaggatgaagggagactgggcaagactcttacgacccatgctccagtttgggctcattgctttttccatatatgtgggcctttctcgagtgtctgactacaaacaccactggagtgacgtcacagttggactcattcagggagctgctatggctatactggttgctttgtatgtatccgatttcttcaaggacacacattcttacaaagagagaaaggaagaggatccacacacgactctccatgaaaccgccagttcacggaactactcaaccaatcacgagccctgaagggtacaggggcgctggcccgcttcaaaggcaacagctggaggctaaaggcagggggatgcgtattacttcctgctgtacagaccattctataaaggactgctgctatctacaaaaaaaaaaaaaaaaaaaaaaaaaaaaaa

SEQ ID NO: 345 - DNA, 7923 bp, Mus musculus
cgataatatgcatgtgtcactggcagaagccctggaggttcggggtggacctctgcaggaggaggaaatatgggctgtattaaatcagagtgctgaaagcctgcaagaagtatttagaagagtgagcattgctgaccctgctgcgctgggcttcatcatctctccatggtcgctgctgttgctgccatcgggcagtgtgtcctttacggatgaaaatgtctccaatcaggaccttagagcatccaccgcaccggaggttcttcagagccattctctgacttctctcgcagatgtagagaagatccatatttattctcttggaatgacattgtattggggggctgaccatgaagtacctcaaagccagcccatcaagctgggagaccatcttaatagcatcctgctgggcatgtgtgaggatgtcatctatgctcgggtgtcggttcggaccgtcctggatgcttgcagtgcccacatcaggaacagcaactgcgcgccttcgttttccaatgtgaaacagttggtaaagctggttctgggcaatatttctgggacggatccactttcccgtagcagtgaacaaaaacctgaccggagccaggccattcgagaccgactgagaggaaaaggattgcccacaggaagaagctccacttcagacgcactagacacacacgaggctccactctctcagcagacctttgttaacaaagggcttagtaagtctatgggatttctgtccatcagagacacacgagatgaggaagactatctcaaggatactccatctgataataattccaggcatgaagattctgagactttctcttccccttaccagttcaaaactagtactccacagatggatgcactctccaagaagaagacatgggcttcctccatggacttgctctgtgcagctaacagagacatttctggagagacgggcaggtaccaacgctgtgaccctaagacagtgacaggacggacgtccatcactcctagaaaaaaagaaggaaggtactctgatggaagcattgccttggatatctttggccctcagaaggtggagccggtgatccacacccgagaactgccgacctccaccgcggtatcaagcgctttggaccgaattcgagagagacaacagaaacttcaggttctgagagaagccatgaatgtagaagagccagttcgaagatacaaaacttaccacagcgatatctttagtatttccagtgaaagcccatctgttatttcctcggaatcagacttcagacaagtaagaaaaagtgaagcttccaagaggtttgaatccagcagtggtcttcccggagtagatgaaactggccagacacgaccaagtagacaatatgaaacatccctcgaaggcaacttgatcaatcaggacataatgctaaggcgtcaagaggaagaaatgatgcagctgcaagccaggatggctctccgacagtcgcggctcagcctgtatccaggggacaccgtcaaagcttccatgctcgacatctctagagaccccctaagggaaatggccctggagacagccatgacccagaggaagctcaggaatttctttggacctgagtttgtgaagatgacggttgagccatttgtatctttggatttgccacggtctatcctctcgcagaccaagaaggggaagagtgaggaccagcggcggaaagtgaacataaggctcctgagcgggcagcggctggagctcacctgcgacaccaagaccatctgcaaggatgtgttcgacatggtggtggcgcacatcggcttggtggagcaccatttgtttgctctcgccacccgcaaagagaatgaatatttctttgttgatcctgacttaaaattaaccaaagtggccccggaggggtggaaggaagaaccgaagagaaagggcaaggccgccgttgactttacgttgtttttccgaattaaatttttcatggatgatgttagtctgatacaacatgacctcacgtgccatcagtattaccttcagctgaggaaagaccttctggatgagagggtgcactgtgacgacgaggccgccctgcttcttgcatccttggctctccaggcagagtatggagattatcagccagaggttcatggcgtgtcctactttcgcctggaacattacctgcccgccagggtgatggagaagctggacgtgtcctacattaaagaagagttacccaaactgcataacacctatgcaggcgcttccgagaaggagacagagctagagttcttaaaggtctgccaaaggctgacagagtatggagttcactttcaccgggtacaccctgagaagaagtcacagacagggatactgctgggggtctgttccaaaggtgtgctggtctttgaggttcacaatggagtccgtgccttggtccttcgcttcccgtggagggaaacaaaaaagatttccttttcaaagaagaaaatcacattacagaacacgtcagatggaatcaagcatgcgttccagacggacagcagcaaggcatgccagtacctgctgcacctgtgctcctcccagcacaagttccaattgcagatgagggcgcggcagagcaaccaggatgcccaagacatagagagagcttcgtttaggagcctgaacctgcaagcagagtctgttagaggatttaatatgggccgcgcaatcagcacgggcagtctggccagcagcaccatcaacaaacttgccgtccgacccctgtcagttcaagctgagattctgaagaggctgtccagctcagagtggtcgctttaccagcccctgcagaacagttcaaaagagaagactgacaaagcttcctgggaggaaaagcctagagggatgagcaaatcgtatcacgatctcagtcaggcctctctctgtcctcaccggaaacaggtcattaacatggaggccctcccacaagcctttgcggagctggtgggaaaacccttgtacccgatggcaagatctgacacagagtcactggcaggactcccaaagcttgataattcaaagtctgttgccagtttaaatagaagccccgaaaggaggaaccatgaatcagactcatccactgaagaccctggccaagcatatgttgtaggaatgagtttgcctagctctggaaaatcttcatcccaagtcccctttaaagacaatgatacactgcacaaaagatggagcattgtttcgtcaccagaaagggagatcacactggtgaacctgaagaaagatccaaaacacggcttaggatttcaaattatcggtggggaaaaaatgggaagactggatctaggagtgtttatcagtgcagttacccctggaggacctgctgacctggatggatgcttaaagcctggagaccgtttgatatctgtgaacagtgtgagtctggaaggggtcagtcaccacgctgcagtggacattctgcagaatgcacctgaagatgtgacacttgtcatctcccagccaaaagaaaaaccgtccaaagtgccttctactcctgttcattttgccaatgggatgaaaagctacacaaagaaaccggcatacatgcaggacagtgctatggacccatcagaggaccagccctggccacggggtactctgaggcacatcccagagagtcccttcgggctgtctgggggcctgcgggagggaagcctcagttcccaagattccaggactgaaagtgccagcctatcccagagccaagtcaacggcttctttgccagccacttaggcgacagaggctggcaggaaccacagcatagcagcccatcgccatctgtgacaaccaaggtcaacgagaagaccttctccgacagtaaccgaagcaaggccaagcggcgaggcatctccgatttgattgaacacctcgactgtgctgattccgacaaagacgattccacttacaccagcagtcaagaccatcaaacgtcaaaacaggaaccttcctcctcactgagtacatcgaacaaaacgagctttccaacctcgtctgcgtcacctcctaagcccggagacacgtttgaggttgagctggctaaaactgatggcagcctggggataagtgtcacgggaggtgtgaataccagcgtccgacatggtggtatttatgtgaaagccattattcccaaaggagcggcagagtcagatggcagaattcacaaaggtgatcgtgtgctggctgttaatggagtcagtctggaaggagctacccacaagcaagctgtggaaacgttaagaaacacagggcaggtggtccatctgttgttagaaaaggggcaggtgccaacatctagggaacgggatcctgcaggcccacagagcccccctccagaccaagacgcccaaagacaagccccggaaaaggtggcgaagaaacaccccatgtcaaagactacagctttgttactgaagataatctttgaggtcaagctgtttaaaaatagctcaggccttggattcagtttttctcgggaagataatcttataccagaacaaataaatggcagcatagtaagggttaaaaagctcttccctggacagccggcagcagaaagtgggaaaatcgatgttggagatgttatattgaaagttaacggagcccccttgaagggactgtctcagcaggacgtcatctctgctctcaggggaacagctccagaagtgtccttgcttctctgcagaccggcacctggtgtgctaccagaaatcgatactacatttttgaacccactctactctccagcaaactcatttctaaacagcagtaaagagacttcgcagccatcatcctcagtagagcagggtgccagctcggacgacaatggggtgtctggcaaaaccaagaaccattgcagggctccatccaggagagagagttacagcgaccacagcgagagtggagaggatgactccgtgagagcaccagccaagatgccaaatgtgacccgagtggcagcctttccacacgaagcaccgagaagccaggaagagtccatatgtgccatgttttacctccctcggaaaatacccggaaagctggagtccgagagcagccatcctcctccactggacgtgagccctggacagacgtgccagcccccggcagagtgtgctccgtctgacgccactggcaaacactttacacatcttgcctctcagctgagcaaagaggaaaacataacaaccttgaaaaatgacttgggaaaccaccttgaggattctgagctggaagtagagcttctcattaccctggttaaatcagaaaaaggaagtctgggctttacagtaaccaaaggcagtcagagtattggttgttatgtccatgatgtcatacaggatccagccaaaggtgacggaaggctaaaggctggagaccggcttataaaggttaatgatacagacgttacaaacatgacccacacagatgcagtgaatctgctgcgagccgcacccaaaacagtcagattagttcttgggcggattctggagttacccaggatgccagtatttccccatctgctgcccgacattacagtcacatgccacggagaggagttaggatttcccctgtctggaggtcaaggcagtccacatggagtggtgtatattagtgatatcaacccaaggtcagctgcagctgttgacggtagtctccagctattagacatcatccattatgtgaacggagtcagcacacaaggaatgaccttggaagatgcaaacagggcattggacctgtcacttccttcagtggtgctgaaagtaacaagagacggttgtccagtggtgcctacaacaagagctgccatttctgcgcccaggttcaccaaagccaacggcctaaccagcatggagccttctggacagcctgcactcatgcccaagaactccttctccaaggttaacggggaaggagtacatgaagctgtgtgccctgcaggagaaggctcgtcttctcagatgaaggagtcagcaggcctgactgaaaccaaagaatctaactcccgggatgatgacatctatgatgatcctcaagaagctgaagttatccagtccttgctggatgttgtggacgaggaagcacagaacctcttaaaccagaggcatgccaccagaagagcctgttctccagatccactgaggacgaatggggaggcaccagaagaaggagataccgactatgatgggtctccgctacctgaggacgtccctgagtcagtgagcagcggagaaggaaaagtagaccttgcaagcttaactgcagcatcacaagaagagaagcccatcgaagaggacgccacgcaggaaagcagaaactcgacaacggagacaacagacggtgaagattccagcaaagatcccccctttctgacgaatgaggagctggcagccctgccggtggtcagagtccctccctctggcaagtacacgggcacacagctgcaggccaccatccgcacgctgcagggcttgctcgaccaagggatcccttctaaggagctggagaaccttcaagaattaaaacctttggatcagtgtctgattggacagacaaaggaaaaccgcaggaagaacagatacaaaaatatccttccctatgacaccacaagagtgcctcttggagatgaaggtggatacatcaatgccagtttcatcaggatcccggtggggacccaggaattcgtgtacattgcctgccaggggccgttgcccaccactgtgggggatttttggcagatggtttgggagcagaactccacggtgatagcaatgatgacgcaggaggtggaaggagaaaagatcaaatgccagcggtactggccaagcatcctgggcacaaccaccatggccaacgagaggctgcgcctggccctcctgaggatgcagcagctgaagggcttcatcgtgcgggtgatggccctggaggatattcagacaggggaggtgcgacatatttctcatctgaatttcactgcctggccagaccacgatacaccgtcgcagccagacgacctgctcacattcatctcctacatgagacacatccgtaggtcgggcccagtcatcacacactgcagcgctggcattggacgctcaggaaccctcatttgcatagacgtggtcctaggcttaatcagccaggatctggaattcgacatatctgacctagtgcgctgcatgaggcttcagaggcacggcatggtgcagaccgagggtcagtatgtcttctgctatcaagtcatcctctatgtcctgactcatcttcaggctgaagagcagaaggcacagcagggctcccacagtgatgcagagcagcctccaaaggctcctccttagctgcatccagccgactcctgctctccactcttgagagcagcaaggccaagcaagcagcaccgtgaagcttagtccctcctgcttgaaggacaggcgttcccgtcagatacggacgtcaagatgctctcttttacagccacttcaaccactgatggtcattaaaagtcctttttcactaactgaaccagcaggtcttagggctggagacagcatttgatcatagtggacgttgttacaaagacacactgagtctattttaatgtaccaaatcctgtttatagcaaaaattttccagtattttaataaagtagatttattttataggggatacttgaagccagtatttaagcttttaatgacagtaatattggcatagaagacgaactagcaatgtttactgtatccatttctaatgtttactatatataatttcctgtaatatatttatatacttttcatgaacatggagttaccagataccgtttgtacctgtgtcatctcactttgtaaataaaactagaccttaaaacata

SEQ ID NO: 346 - DNA, 503 bp, Mus musculus
aaacctctctattcagcacttcctctctcttggtctggtctcaacggttaccatggcaagacccttggaggaggccctggatgtaattgtgtccaccttccacaaatactcaggcaaagagggtgacaagttcaagctgaacaagacagagctcaaggagctactgaccagggagctgcctagcttcctggggaaaaggacagatgaagctgcattccagaaggtgatgagcaacttggacagcaacagggacaatgaagttgacttccaggagtactgtgtcttcctgtcctgcattgccatgatgtgcaatgaattctttgagggctgcccagataaggaaccccggaagaagtgaagactcctcagatgaagtgttggggtgtagtttgccagtgggggatcttccctgttggctgtgagatagtgccttactctggcttcttcgcacatgtgcacagtgctgagcaaattcaataaaaggttttgaaactaaaaaaaac

SEQ ID NO: 347 - DNA, 2069 bp, Mus musculus
cgatctgcgactccagcgcgggggacgcagcagacagctcctagctctgctctgaccacagttttcctgacttctcttccgggccctccggcatggcgatggcagtagcccagaagttcaaccaccttctgtccagcctgtggcacgtgggccagaagcctccgcaaccagaacctgtgtttacagtggaccgggcccaggtgccgccacttttctggaagccgtacatctatgctggctaccggccgctgcatcagaactggtgtttctacttccgcacactgtttcagcggcacaacgaggctgtgaacgtgtggacccacctcctggcggccctggctctgctgctgcggctgatcggcttggcggcaagtgtggacttccgggaagaccctcacgcgctgcccctcttcttcatcgtcttggcctccttcacctacctctcgttcagtgctgtggctcacctcctgcaggccaagtcggagttctggcattacagcttcttcttcttggactatgtgggtgtggccgtgtaccagtttggcagtgccctggcacacttctactatgccatagagccgtcctggcatgacaaggtgcaggctattttcctgcccacggccgccttcctggcctggctttcctgcgctggctcctgctacaacaagtacagccagaagccgggtctgctggggcgcattttccaggaggcgccatcggcgctggcctatgtgctggacatcagtcccgtgttgcaccgcatcatagtgtctcccctccctgccgaggaggatcccgctcttctctatcacaaatgccaagtggttttcttccttctagctgctgcctttttctccacggttatgcctgagagttggttccccggcagctgtcacatctttgggcagggacaccaagttttccatgtctttttggtgctgtgcactctggcccagctagaggcggtgacactggattatcaggcccggaggggcatatacgagcctctgcacgcccgttggccccacaacttctctggcctcttcctgctcaccgtggccagcagcagcctcactgcgctcctcctcagccagctggtgcggcgcaaactacatcagaagaccaagtgaaagcgggtgggtgggagctggcagggtgagagaaggtgctagggacaaaagcctggacttggctccagatcggaacaaggcctggtaaagctggttctatctggcaggccatgactccctgcatacaagctcaatggccaaagtgatgctgctagccaatccttgggcctgcagattggctgggagctgtagagccttgctcagttccctgggaggggcagagatgaaggactcctgactgcccctcccttgccgcctatcagggctaagggttggagttcagctttggtcaccacactggtttggggttttcaggttgctgggcgagaagactcaggccagtgtcaaatttgagcagagagggagtggaagtcttagcagccaccacctaccagagctcactggtggagggaaaagaaacaggcccaacgatgggtagtgttttaacttcactgtcccctgcaccacagcctggatcgctgggttccagagagtctccaaagataagagatcccctctcctgcccacatccctgcatcacagcccagccagaaagcctcacagctagcattggcctgtatctcttgcacactgtttccagcttctccccacaactcatttatgattttgagatatgactccttagctcactgtttcctggggctccaggctttagaaccgttaggaattgtcaaggaaaactcaaagtgctgactagtcagcactgcagggcacgcagagccttggcttaggaagggtgaggagtttgcaggctgagcttagaagggcgttgcaggcaaaagggaagcctgtaccgagattcgagatgcagagatgcagggagttcaggggggctaaaggcaagtttggtccctggggctgagagccaaggctggtccctgatatgccctagattcaataaaatgactatgatattgc

SEQ ID NO: 348 - DNA, 1866 bp, Mus musculus
cgctacctgtctccgcggccgggcaagagagagaccccggcgtgaggcggcctccctgggccggaagggctggtcagccgacgcagcggcaccggaggctgagagggtaggaccaggggacgccatggccccgcagaacctgagcaccttctgcctgttgctgctgtacctcatcgggactgtgatcgccgggcgagatttctataagatcttgggggtgcctcgaagtgcctccataaaggacattaaaaaggcctacaggaaactagccctgcagctccaccctgaccggaaccctgatgacccccaagcccaggagaaattccaggatctaggtgctgcttatgaggttctgtcagatagtgaaaaacgaaaacagtacgatgcttacggtgaagaaggcttgaaagatggccatcagagctctcatggggacattttttcacacttctttggagactttggcttcatgtttggaggaacccctcgtcagcaggacaggaatattccaagaggaagtgatatcatcgtagatctagaagtcactctggaagaagtgtacgcaggaaattttgtggaagtagttagaaacaagcctgtggccaggcaggctcctggcaaacggaaatgcaactgtcggcaagagatgagaaccacacagctgggaccgggacgcttccaaatgacccaggaagtggtttgtgacgagtgccctaatgtcaaattagtgaatgaagaacgaacactagaagtggaaatagagcctggggtgcgagatggcatggagtacccctttattggagaaggtgagccgcatgtggatggggaacccggagacttacggttccgaatcaaagttgtcaagcaccggatatttgagaggagaggggatgacctgtacacaaatgtgaccgtctcactggttgaggctctggttggctttgagatggacataactcacctggatggtcacaaggtccatatttcccgggacaagatcaccaggccaggagccaagctgtggaagaaaggggaagggctgcccaactttgataacaataacatcaagggctctttgataatcacttttgatgtggactttccaaaagaacagctgacagaggaagcaaaagaaggtatcaagcagcttctcaaacaaggccccgtgcagaaggtgtacaacgggctgcagggctattaggagcgaagagaactggactttgaaagaggtggatcagcgatatttattatctgcagtgggtttttgtgtgtgtgtttcattattttcaatatgcaagtttggcttagtccttttttccctgatgaccgtcctgacaagaactagaggtttgaggctctgtctattgcattcagacaacaatggccagcagaaggttacctaatacctccccctctggggatttaacgtctggtgctgcccgaggttcaaggagtaacgtctcagaggatgcccgagcaaaggaaaccagatgagggttagagacaattgttagctatttcaaaatgccaactggagaagtctgtttttaaatacatcttgttgttattttttttttcttgactcctgtttctttttcctgtgagccgatgggaagtcttcccatcaggcaggatggccacacagcatgcagaggaacgatgagagcccggctcccaggccccactaaacacatggtgtctatagcaacgagctcgaagaaaccgagtagactagagactgagctacatgaattaaagttacacaaagacctcactgtctttgagagaacatattttcccgttttctttggtaataataaaatctgatatgggtattttactgttaaaaaaaaaaaaaaaaaaaaa

SEQ ID NO: 349 - DNA, 5358 bp, Mus musculus
cgggttcttccgggttggaggcacaacgccgcgggccaaccccgggtctgctagcgcggcgtggcgtttgctcgcagcccggggtcgccatctgtcccgcctgccggtccagtaatccaccttcaaggaattggggatccgaaacgttgggagcataaagcagcatggcgcacctactgaagacggtggtggctggctgttcatgtcctttccttagcaacttggggtcctctaaggttctacctgggaagagagactttgtacgaatgcttcgtactcaccaggcactgtggtgtaaatccccggtaaagccaggaattccatataagcagttgacagttggggtccccaaggagattttccaaaacgagaagcgagttgcattgtctcctgcgggggtccaggccctggtcaagcagggcttcaatgttgtcgtggaatcaggcgcaggcgaagcttccaagttcccagatgacctctacagagcagcaggggcccagatccaagggatgaaggaagttctggcttctgatctggtggtcaaagtgagggcccccatggtgaacccgacgttaggcgctcacgaagctgactttttaaagccatcaggaactctaattagcttcatctacccagcccaaaatccagacttgctcaataaactttctgaaagaaaaaccacagttctggcgatggaccaggttccaagagtgacaatagctcagggctatgatgctctcagttccatggccaacatctctggttataaggctgttgttttagcagcgaatcattttgggaggtttttcactgggcagatcacagctgctggaaaagttccccctgcgaagatcctgatagttggtggtggcgttgctgggctcgcttctgcgggggcagcaaagtcgatgggcgcagttgtccgaggatttgatacaagagctgccgctttggaacagttcaaatcccttggtgctgaacccttggaggttgacttgaaggaatctggtgagggccaaggaggatacgcgaaagagatgtccaaagagttcattgaagctgaaatgaagctctttgctcaacagtgcaaggaggtggacatccttatcagcacagctctgattccaggtaagaaagctcctgttttatttagtaaagaaatgatcgagtccatgaaggaagggtcagttgttgtggatttagctgctgaggctggaggaaactttgaaacgactaagccgggagaactttacgttcataagggaatcactcatattggctacacagaccttcccagcaggatggccacccaggcgagcactctctattccaacaacatcactaagctcctgaaggccatcagccctgacaaggacaattttcactttgaagtgaaggatgactttgactttggtacaatgagtcacgtcattcgagggaccgtggtgatgaaggatggcaaagtgattttcccagctcccacaccaaaaaatattcccgaagaagccccagtcaaaccgaagaccgtggctgagctggaagccgagaaagcaggcaccgtctccatgtacacaaagacactgacgacagcatctgtgtactcggcaggtctcactgggatgttaggtttgggcatcgtggcccccaatgtagccttttctcagatggtgaccacttttggcctagccggcattattggctaccacactgtttggggagtgacccctgctctccactcaccgctgatgtctgtgaccaatgccatctcaggtttgactgcagttggtgggctggcgttgatgggagggcatttttatccctccacaacttctcagagtcttgctgctcttgctacatttatatcatcagtcaacattgcaggtggttttctggtgactcagagaatgctggacatgttcaagcgacccacggaccctccagagtataattatctgtatctgctccctggtggcaccttcgtaggtggatatttagctgctctctacggtggctataacatcgaagaaatcatgtacctgggctcaggcttgtgctgtgttggggccctgggcggcctttccactcagggaacagctcgactcggcaatgccttgggcatgatcggggttgcaggaggcctggcagccacccttggaggcctgaagccggacccgcagctgttagctcagatgtctggagcaatggcaatgggtggcaccatcggcctgacgatcgcaaagcggatccagatttccgacttgcctcagctggtcgctgctttccacagtttggtggggctggcagcagttcttacctgcatggccgagtacatcgtagagtatccacattttgcaatggatgccacgtcaaatttcaccaagattgtggcttaccttggcacttacatcggcggagtcacctttagtgggtctcttgttgcctacggaaaattacagggtattttgaaatcagctcctctgctgctccctggaaggcacgcactcaatgcaggcctgctggctgctagcgtgggtgggataatcccatttatggctgaccctagctttaccaccggcatcacctgtctgggctctgtgtccgcactctctactctcatgggtgtgactttgacggctgctattggtggtgctgacatgcctgtcgtcatcaccgtgctaaacagctactcgggctgggctctgtgtgccgagggcttcctgctcaacaacaacctgctgaccatcgtgggcgcgctcatcggctcctctggtgcaatcctgtcgtacatcatgtgtgtggccatgaaccgctccctggctaatgtcattcttggaggctatggcacaacgtcaacagctggtggaaaacccatggaaatttctggcacacatacagaaatcaacctggacaacgcagttgagatgatccgggaagctaacagcattgttattactccagggtatgggctctgtgctgctaaagctcagtaccccattgccgatttggtgaagatgcttactgaacaaggcaaaaaagtcaggtttggaatccacccagttgcgggccgaatgcctggtcagcttaatgtgctcctggccgaggcgggagtgccctatgatattgtgttagaaatggatgagatcaacagtgattttccagacaccgacttggttcttgtcattggagcaaacgacactgtgaattcggcggctcaagaagaccccaattctataattgcaggcatgccggtccttgaggtctggaagtccaaacaggtcattgtcatgaagaggtcccttggcgttggctacgctgccgtggacaatccgatcttctacaaacctaacacagctatgcttctgggggacgccaagaagacatgtgacgctctgcaggccaaagttcgggaatcctatcagaagtgaagattgaagatccagccgatgccttcggttgcaggaacagagaaaggaggcgttcatagatgagcaaagctctcaagacccaaagaagcctcacaaaacaatggagattttcaagatcagcaccccatgcttctcaaaaagcattggaaattctcatcgcctacctatgtactgtcgccattgcccaaaaagcaagagtattttgtccacagtgaaaaagcagcctcactttagatgcaaccccactggattcttaaaattccctttcagtagctagaaatcagttcagaagttgaatgttcgagatttcaggatatgggttggtctgaaaaatattacacaatatgatcattgtagacacctgcatttagtgcctttttttcttttttcttttcaccagatgtgactaatttgaaacctttatcaactcctgacctgttctcttgcatcttagccatactctggattgatcatgccaaatctgcagcaggttatcagccttcactatagactctagattccaaagatctattttctcacttctattttaatatgtaaaaggtctagatagtttaagtaataacttaaacataataagttgtatttttgaaagtcccattgccaattggtctctttaactgcaatcaactaagtgctcttgaatggactgtattaagtgcgcttgaatggaatgcaaccatctgagtaataaatgagtttataaaagtgatgtagcttcgtctctgatgacaaagagctaacattaaatggttccactcattaacactggaggaagacctactactttgtaataggtagagttaatctctcttcattgtttagaagatggaattacttttcaaagccactgtaatttgtgaggtcgtatataatttgatgacactgaaacataataacagtatttttagccatatcttcaatgaacagtgaaaaaaggaacatctttcatagaagtttagattttctttgtgactttaccttttacatcaaaagctctttagtagagatgaatgtggctcattattaggattctgtctctctgtgcactcggtttggtaccaagtctcccaaagtagttattaacccatacaaggcttggggcttaattggtcgagtgcttgccttatgtgaggtcctgagtccaatccccactactgaaaagcaaacaagcagcaaagctgttgacgcacacaaagctgtccctaaatctgaagactatcagtgaaaactttgctcatctttatcaagtttctaacgcacaatatctgttaggtttatgagcaagttctgtttcactgtgtctgagataaaggataggggagggaggaaggggaaggagggacagagaagagggaggagaggagggagaagcaagagggagatgttagagcagcaaagatttcttttaaatatctaagaaataaatgcaatttactaatggatctgaggttactagtagcttcaagtttattataaaagttctgttagacaaaattaaataatatctttattcatattcctttcttccttttaaagccgctgtaggtgtttctagaaagtagcaagttaaattttgaaagtagttccaaaattcaatttaaatcttaataattggaggggattttacttctttccccagatgccttttggtggtatctagagacatttttgggtttcagaactggcagatcctactagcatccaatgataaaagccaaggaatgctactaaatgatcattctaaatgcacaggaccagtctccagcaccatgcagtacagggtataatctactccccaagtatcaatctgatgtctttcttggtgtcttaaatactaattacaatatctaaagcatggcagttttagtttatggcactatttatatgaaaaaaaaaagcatttgtcaaaatg

SEQ ID NO: 350 - DNA, 2538 bp, Mus musculus
cggagaagcagttaggaagctctgctagcctcacggccacgggacgcctctctgaacggggatccaggcaggattagagctgcctcactgactacaggccgtgtcgtgtcaccgtttctgcaggcaccatgagccaggacaccgaagtggacatgaaagatgtggagctgaacgagctagaaccggagaagcagcccatgaatgcagcggccggggcggcggccggggagaagaacggtctggtgaagatcaaggtggcggaggacgagacggaggccggggtcaagttcaccggcttatccaaggaggagctactgaaggtagcgggcagccctggctgggtgcgcacccgctgggcgctgctgctgctcttctggctcggttggctgggcatgctggcgggcgccgtggttatcatcgttcgggcgccgcgctgccgtgagctgcctgtacagaggtggtggcacaagggcgccctctaccgcatcggcgaccttcaggcctttgtaggcccggatgcgggaggcatagctggtctgaagagccatctggagtacttgagcaccctgaaggtgaagggcctggtgttaggcccaattcacaagaaccagaaggatgaaatcaatgaaaccgacctgaaacagattaatcccactttgggctcccaggaagattttaaagaccttctacaaagtgccaagaaaaagagcattcacatcattttggacctcactcccaactaccagggccagaatgcgtggttcctccctgctcaggctgacattgtagccaccaaaatgaaggaagctctgagttcttggttgcaggacggtgtggatggtttccaattccgggatgtgggaaagctgatgaatgcacccttgtacttggctgagtggcagaatatcaccaagaacttaagtgaggacaggcttttgattgcagggactgagtcctctgacctgcagcaaattgtcaacatacttgaatccaccagcgacctgctgttgaccagctcctacctgtcaaattccactttcactggggagcgtactgaatccctagtcactaggtttttgaatgccactggcagccaatggtgcagctggagtgtgtcgcaggcaggactcctcgcagactttataccggaccatcttctccgactctaccagctgctgctcttcactctgccagggactcctgtttttagctacggggatgagcttggccttcagggtgcccttcctggacagcctgcgaaggccccactcatgccatggaatgagtccagcatctttcacatcccaagacctgtaagcctcaacatgacagtgaagggccagaatgaagaccctggctccctccttacccagttccggcggctgagtgaccttcggggtaaggagcgctctctgttgcacggtgacttccatgcactgtcttcctcacctgacctcttctcctacatacgacactgggaccagaatgagcgttacctggtggtgctcaacttccgagattcgggccggtcagccaggctaggggcctccaacctccctgctggcataagcctgccagccagcgctaaacttttgcttagtaccgacagtgcccggcaaagccgtgaggaggacacctccctgaagctggaaaacctgagcctgaatccttatgagggcttgctgttacagttcccctttgtggcctgatccttcctatgcagaacctaccgccctcctttgttctccccaggccttttggattctagtcttcctctccttgtttttaaacttttgcagattacatacgaattcttatactgggtgtttttgtcttcaaataaaaacatcacccctgcctcatgagagttgtgactttcatccttccttccttctagaagaactttctcttgctcctgatctcttttgctcctccctgcccctgccatagtcgcagccagttgtagacagctattccagctctttttttttttttttttgatttttcgagacagggtttctctgtatagccctggctgtcctggaactcactttgtagaccaggctggcctcgaactcagaaatccacctgcctctgcctcccaagtgctgggattaaaggcgtgcgccaccacgaccggcccctattccagctcttaaattaatcatttagagaccaaggctagagaagggcccttccatggttaacagcaaagtgtcttggctggagtaaccacacctcctcgctctggcccaagaatcttgggaattgccaactcttccttatctctcttagcacagtctttaagaaaaagggtggggtgagttgaagactgcatactgccaagggcctggggcttcccttctttactctttggtgaggcacttaccatatagacgggtctgcgatccccagtacccagtggataccccatctccagaaaaagccaacaagacaaaccctttgcttccttaggctatgttatctcttgtgtggaaatggagaagaaataaggaataaacattttttgtatgaagc

SEQ ID NO: 351 - DNA, 2310 bp, Mus musculus
aagaggtaatcccgcgtccgaatcgagttcccggaatcagacggtgccccatagatggccagctttcccccgagggttaacgagaaagagatcgtgagatcacgtactataggggaactcttggctccagcagctccttttgacaagaaatgtggtggtgagaactggacggttgcttttgctcctgatggttcctactttgcgtggtcgcaaggatatcgcatagtgaagcttgtcccgtggtcccagtgccgtaagaactttcttctgcatggttccaaaaatgttaccaattcaagctgtctaaaattggcaagacaaaacagtaatggtggtcagaaaaacaagcctcctgagcacgttatagactgtggagacatagtctggagtcttgcttttgggtcttcagttccagaaaaacagagtcgttgcgttaatatagaatggcatcggttccgatttggacaggatcagctactccttgccacaggattaaacaatggtcgcatcaaaatctgggatgtatatacaggaaaactcctccttaatttggtagaccacattgaaatggttagagatttaacttttgctccagatgggagcttactccttgtatcagcttcaagagacaaaactctaagagtgtgggacctgaaagatgatggaaacatggtgaaagtattgcgggcacatcagaattgggtgtacagttgtgcattctctcccgactgttctatgctgtgttcagttggcgccagtaaagcagttttcctttggaatatggataaatacaccatgattaggaagctggaaggtcatcaccatgatgttgtagcttgtgacttttctcctgatggagcattgctagctactgcatcctatgacactcgtgtgtatgcctgggatccacacaatggagaccttctgatggagtttgggcacctgtttccctcgcccactccaatatttgctggaggagcaaatgaccgatgggtgagagctgtgtctttcagtcatgatggactgcatgttgccagccttgctgatgataaaatggtgaggttctggagaatcgatgaggattgtccggtacaagttgcacctttgagcaatggtctttgctgtgccttttctactgatggcagtgttttagctgctgggacacatgatggaagtgtgtatttttgggccactccaaggcgagtccctagccttcaacatatatgtcgcatgtcaatccgaagagtgatgtccacccaagaagtccaaaaactgcctgttccttccaaaatattggcgtttctctcctaccgcggttagactgaagactgcctttcctggtaggcctgccagacagagcgccctttacaagacacacctcaagctttaccagctcaagcgtctgtccttggaggctcagcagatttatttaattggaatccactcttattcttcatttcattagttggacttttaaagcattatttatacaccatagaaatatttctgaacatatcatgtaatttttttaagataactgtgaaaacattacatacatgtatatatttagacatgagctgctgctatatattgaatgggccctttagttttctcttagttctgacctgtatatattgctttaatagagccacgatttgtatatgtgctgttcattagagcaaattcaggggaatttttgttcttttttttttatttgggggcactaagtttagatgagatgaattgcctcataggaaatggaattggtcaggatagatggtgtgaaactgataagaggttttggatgtgaaaaagagtttccaaaagaatggtgtctgggagtttgaatgtgatgattaaaaaaagagccaaggaaaaaggtagctagaaaaaaaggttggctctcatcagccttaattttggaaagcagctacttacccctcagagaataaagtattatgcattcttgtcaatttgaaaactgcatctactgtattattgctgaatattttgttaatactaagggacaattattttaagaccatgggttttgtttttaacatattttatttctgcagaggatattggtaacttaccaaagagaagcaatacacagtatgtctgctttagccttcttttatttatctcatctgcagatgttgagaatgtatgcattatgtaaaatgcttgtttttttatccctgttgagtttttttaattaaacgacacaaaactaaaaaaaaaaaaaaaaaaaaaaaaaaaaaaaaaaaaaaaaaaaaaaaaaaaaaaaaaaaaaaaaaaaaaaaaaaa

SEQ ID NO: 352 - DNA, 2918 bp, Mus musculus
acgagccctaaccggatcgctgaggtacaaccccgctcggtgtcgcctgaccgcgtcggctaggagaggccaggcggccctcgggagcccagcagctcgcgcctggagtcagcgcaggccggccagtcgggcctcagccccggagacagtcgagacccctgactgcagcaggatggctcagtggaaccagctgcagcagctggacacacgctacctggagcagctgcaccagctgtacagcgacagcttccccatggagctgcggcagttcctggcaccttggattgagagtcaagactgggcatatgcagccagcaaagagtcacatgccacgttggtgtttcataatctcttgggtgaaattgaccagcaatatagccgattcctgcaagagtccaatgtcctctatcagcacaaccttcgaagaatcaagcagtttctgcagagcaggtatcttgagaagccaatggaaattgcccggatcgtggcccgatgcctgtgggaagagtctcgcctcctccagacggcagccacggcagcccagcaagggggccaggccaaccacccaacagccgccgtagtgacagagaagcagcagatgttggagcagcatcttcaggatgtccggaagcgagtgcaggatctagaacagaaaatgaaggtggtggagaacctccaggacgactttgatttcaactacaaaaccctcaagagccaaggagacatgcaggatctgaatggaaacaaccagtctgtgaccagacagaagatgcagcagctggaacagatgctcacagccctggaccagatgcggagaagcattgtgagtgagctggcggggctcttgtcagcaatggagtacgtgcagaagacactgactgatgaagagctggctgactggaagaggcggcagcagatcgcgtgcatcggaggccctcccaacatctgcctggaccgtctggaaaactggataacttcattagcagaatctcaacttcagacccgccaacaaattaagaaactggaggagctgcagcagaaagtgtcctacaagggcgaccctatcgtgcagcaccggcccatgctggaggagaggatcgtggagctgttcagaaacttaatgaagagtgccttcgtggtggagcggcagccctgcatgcccatgcacccggaccggcccttagtcatcaagactggtgtccagtttaccacgaaagtcaggttgctggtcaaatttcctgagttgaattatcagcttaaaattaaagtgtgcattgataaagactctggggatgttgctgccctcagagggtctcggaaatttaacattctgggcacgaacacaaaagtgatgaacatggaggagtctaacaacggcagcctgtctgcagagttcaagcacctgacccttagggagcagagatgtgggaatggaggccgtgccaattgtgatgcctccttgatcgtgactgaggagctgcacctgatcaccttcgagactgaggtgtaccaccaaggcctcaagattgacctagagacccactccttgccagttgtggtgatctccaacatctgtcagatgccaaatgcttgggcatcaatcctgtggtataacatgctgaccaataaccccaagaacgtgaacttcttcactaagccgccaattggaacctgggaccaagtggccgaggtgctcagctggcagttctcgtccaccaccaagcgggggctgagcatcgagcagctgacaacgctggctgagaagctcctagggcctggtgtgaactactcagggtgtcagatcacatgggctaaattctgcaaagaaaacatggctggcaagggcttctccttctgggtctggctagacaatatcatcgaccttgtgaaaaagtatatcttggccctttggaatgaagggtacatcatgggtttcatcagcaaggagcgggagcgggccatcctaagcacaaagcccccgggcaccttcctactgcgcttcagcgagagcagcaaagaaggaggggtcactttcacttgggtggaaaaggacatcagtggcaagacccagatccagtctgtagagccatacaccaagcagcagctgaacaacatgtcatttgctgaaatcatcatgggctataagatcatggatgcgaccaacatcctggtgtctccacttgtctacctctaccccgacattcccaaggaggaggcatttggaaagtactgtaggcccgagagccaggagcaccccgaagccgacccaggtagtgctgccccgtacctgaagaccaagttcatctgtgtgacaccattcattgatgcagtttggaaataacggtgaaggtgctgagccctcagcaggagggcagtttgagtcgctcacgtttgacatggatctgacctcggagtgtgctacctcccccatgtgaggagctgaaaccagaagctgcagagacgtgacttgagacacctgccccgtgctccacccctaagcagccgaaccccatatcgtctgaaactcctaactttgtggttccagatttttttttttaatttcctacttctgctatctttgggcaatctgggcactttttaaaatagagaaatgagtgagtgtgggtgataaactgttatgtaaagaggagagcacctctgagtctggggatggggctgagagcagaagggagcaaggggaacacctcctgtcctgcccgcctgccctcctttttcagcagctcggggttggttgttagacaagtgcctcctggtgcccatggcatcctgttgccccactctgtgagctgataccccaggctgggaactcctggctctgcactttcaaccttgctaatatccacatagaagctaggactaagcccagaggttcctctttaaattaaaaaaaaaaaaaa

SEQ ID NO: 353 - DNA, 1107 bp, Mus musculus
atggcaccctgcacgctgctcctgctgttggcggccgccctagcccccactcagacccgcgcgggcccacattcgctgaggtatttcgtcaccgccgtgtcccggcccggcctcggggagccccggttcatcgctgtcggctacgtggacgacacgcagttcgtgcgcttcgacagcgacgcggataatccgagatttgagccgcgggcgccctggatggagcaggaggggccggagtattgggaggagcagacacagagagccaagagcgatgagcagtggttccgagtgagcctgaggaccgcacagagatactacaaccagagcaagggcggctctcacacgttccagcggatgttcggctgtgacgtggggtcggactggcgcctcctccgcgggtaccagcagttcgcctacgacggccgcgattacatcgccctgaacgaagacctgaaaacgtggacggcggcggacacggcggcgctgatcaccagacgcaagtgggagcaggctggtgatgcagagtattacagggcctacctagagggcgagtgcgtggagtggctccgcagatacctggagctcgggaatgagacgctgctgcgcacagattccccaaaggcccatgtgacctatcaccccagatctcaagttgatgtcaccctgaggtgctgggccctgggcttctaccctgctgatatcaccctgacctggcagttgaatggggaggacctgaccgaggacatggagcttgtagagaccaggcctgcaggggatggaaccttccagaagtgggcagctgtggtggtgcctcttgggaaggagcagaattacacatgccatgtgcaccataaggggctgcctgagcctctcaccctgagatggaagcttcctccatccactgtctccaacacggtaatcattgctgttctggttgtccttggagctgcaatagtcactggagctgtggtggcttttgtgatgaagatgagaaggaacacaggtggaaaaggagtgaactatgctctggctccaggctcccagacctctgatctgtctctcccagatggtaaagtgatggttcatgaccctcattctctagcgtga

SEQ ID NO: 354 - DNA, 1519 bp, Mus musculus
ccaatctccacacctcctccagcatatcccgagctggtgctccctggtccgggatcttgtccacaatgagcctccagctccgcagctccgcccacatccccagcggttccagctcgccattcatgcggatggcgccgctggcatttctgttgctgttcacgctgccgcagcatctagctgaagctgccccttcctcagtcatagccgcaacggagctgcgttgtgtttgcttaaccgtaactccaaaaattaatcccaaattgatcgctaatttggaggtgatccctgcaggtccacagtgccctacggtggaagtcatagctaaactgaaaaaccagaaggaggtctgtctggatccagaagctcctgtgataaagaaaatcattcagaaaatattgggcagtgacaaaaagaaagctaagcggaatgcactcgcagtggaaagaacggccagtgttcaatagaaagatttctgaggactctgaccccagtgaagagaagaaagggctgattctctccacccacggattttctttatgaactccctgctttgatgagaaaagggaaaccattgtccctgaagcttcctgctcatctcacaagtgtatttagcaaaaatatttcctattctttcctatctgtcacactatcggaaattgtgatactttagtgtgtaagtcaagaatcattggttgttaacctttcaaaatgtcttgaactgagggtgactattgcattgtctccggaatatgtatatgtatgtgtatatgtatatgtatatgtatatgtatatgtatatgtatatgtgtgtgtatatatatatatatcctttgtaatgttcatgagaaggcaatgctgtcatcctctctctcatgaaatggggacctcttttactgttgtttcttgggtgtgttaagagtgttcttacgtctgagcctgggctggcatataacttttatggttttagaaagctgctgtgtcatgcagaaacctgtgtagaatacagttccttatttagaatttctaaatgtgtaagttctagaaggatcaatgtgttctcatcttataattttagacatttgatgtcttcgtagtatggcataatgtcatgacttactcaacaaactgtatactatttattaattattaactagtctattagtattactatttgggccactacgtatatattttagatagtatatattttagataggtgaagaaggtaagaagcaaggaaattccttacctagttttcataaaaaacatttaaaagttatttctagggagagaaactttagcaaatatctatactcttagagttttgaaaacatacttaacatgtttgaatatggattgctgggatatttagatgtctgtagtgtgtcttttaaagagtgtgctttgttataaggagattaatgaattcatcacatccattattttaagcctgtacatcttatagtgtctcacttctttatattactcttttgaggaaaataaagtacctctagattcc

SEQ ID NO: 355 - DNA, 1092 bp, Mus musculus
atgcagcttgaaatccaagtagcactcaattttattatttcttacttgtacaataagcttcccaggagacgtgtcaacatttttggtgaagagcttgaaagacttcttaagaagaaatatgaagggcactggtatcctgaaaagccatacaaaggctcagggtttagatgtatacacgtgggggagaaggtagaccccgtgatcgagcaggcatccaaagagagtggtttggacattgacgatgttcgtggcaatctgccacaggatttgagtgtctggatcgacccgtttgaggtttcctaccagatcggcgaaaagggaccagtgaaggtgctgtacgtggacgacagtagtgaaaccggatgtgagctggataaggagatcaaaaacagctttaacccggagccccaggtgttcatgcccataagcgacccggcctcctccgtgtccagctctccctcacctcccttcggccactctgctgctgtcagccctaccttcatgccccggtccacgcagcctttaacctttaccactgccacttttgctgccaccaagttcggctctaccaaaatgaagaatagtggccgtagcagcaaggtagctcgcacttctccgatcaacctgggcctgactgtaaatgtgaaccacctcctgaagcagaaagccatctcttcctcagtgcactctctgtatgggctgggcctgggcagccagcagcagccacagccgcagccacagcagcagcagcagcagcagccgtcatcatcccagccgccgcctccactaccgcagcagcagcagcagcagccacagcagcagcagcagcagcagcagcagcaaacctctgctctttctcccaatgccaaggaatttatttttcctaacatgcagggtcaaggtagtagtaccaatggaatgttcccaggtgacagccccctcaacctcagtcccctccagtacagcaatgcctttgatgtgtttgcggcctacggaggcctcaacgagaagtcttttgtagacggcttgaattttagcttaaataacatgcagtattctaaccagcaattccagcctgttatggctaactaa

SEQ ID NO: 356 - DNA, 1832 bp, Mus musculus
atggcactgggaaggctgctcctgctgctggcagccgccctgaccctgaccaaaaccggagcgggctcacactcgctgcggtatttcgagacctcggtgtcccggcccggcttcgggaagccccggttcatctctgtcggctacgtggacgacacgcagtttgtgcgcttcgacagcgacgcgaagaatccgagatatgagccgcgggcgccgtggatggagcaggaggggccggagtattgggagcggaacacacggagagtcaagggcagtgagaagagattccaagagagcctgagcaccctgctcagctactacaaccagagcaagggcggcattcacaccttccagaagttgtctggctgtgatctggggtcagatgggcgccttcaaagcgggtacctgcagttcgcctatgatggccttgattacatcgccctgaatgaagacctggaaacctggacagcagcagatgtggcagctcaggaaacccgacacaagtgggagcaggctggtgctgctgagaaacacaggacctacctggagggcaagtgcctgatgtggctccacagatacctggagctcgggaaggagatgctgctgcgcacagatcccccaaaggcacatgtgactcatcaccccagatctcaaggtgatgtcaccctgaggtgctgggccctgggcttctaccctgctgacatcaccctgacctggcagttgaatggggaggagctgacccaggacatggagcttgtggagaccaggcctgcaggggatggaaccttccagaagtgggcatctgtggtggtgcctcttgggaaggagcagaattacacatgccatgtgtaccatgaggggctgcctgagcccctcaccctgagatgggagcctcctccatacactgtttccaacatggtaatcatagctgttctggttgtccttggagctgtgatagtcattggagctgtggtcatcattggagttatggtgtcttttgtgatgaagaggaggagaaacaaaggtggacaaggagaggactgtgctctggctccaagcagggctgcgcccagagctctgatatctctctcctagattgtaaaggtgacactctggtgcctgattggggaggggcaatgtgcatatgattgggtttcagggactcccagaatcctgtgagtggtgggttgttgggatgttgtcttcacagtgatggttcatgactctctttctctagcatgaagacagctgcctggagtagactgagtgatagccagtgtgttcaggtctctcctgtgacatcaagagtctttagacatcagctttctttagaaaatggtgttctcatgttctctgccacaccaaccccagtagcagccatgtgacaagttgcacagactgaggtatacttcaaaagaaggaggcctcctggaccagttgtggaactcttggccagagtattatattgagtcttagttctcatggcaattgatttattttgttttctcttattccttttcttatttacatgttcctcgtaacctaggctaagatctcatgtgaaagtaatgggatagaaacatctagaatgggtcactaacatgacttatctgggaaacgttccctgtgatcctatggtctcagtgtgaagaattttggagcccagtctgcccctgcacaacagaccctgtccctgccctgccctgtcttcccttccacagccaaccttgctggtccagccaaacactagggggcatctgcatcctgccagctccatgctaccctgagctgcagctcctcacttccacactgagagtaagaatctgaatgggacc

SEQ ID NO: 357 - DNA, 2573 bp, Mus musculus
gcagcgagcgccgggtgcggccctgccgccgcagggatgtgaccttcaccgtcgcttagccaggatgaccggagcccgtgtctcgcggcgtccgcgcctcgcttcagcctcccgggtgctctgaccgcacgctcccggctgctaggctccccggcaccggcctcgccatgccgccaccgcccgggcccgccgccgccctgggcactgcgcttctgctgctcctgctggcttccgagtcttctcacactgtgctgttgcgggcgcgtgaggcggcgcagtttctgcggcccaggcagcgccgcgcctaccaagtcttcgaggaggccaagcagggccacctggaacgggagtgcgtggaggaggtgtgcagcaaagaggaggccagagaggtgttcgagaacgaccccgagacggagtatttctatccacgatatcaagagtgcatgagaaaatatggcaggcctgaagaaaaaaacccagatttcgccaaatgtgttcagaacttgcctgaccagtgcaccccaaacccttgtgataagaagggtactcatatctgccaagacctcatgggcaacttcttctgcgtgtgcacagatggctggggaggccggctctgtgacaaagatgtcaatgagtgtgtccagaagaatgggggctgcagccaggtctgccacaacaaaccaggaagcttccaatgtgcctgccatagtggcttctcgcttgcatcagacggccagacctgccaagatatcgatgaatgcacagactcagacacctgtggggacgcgcgatgcaagaacttgccaggctcctactcttgcctctgcgatgagggatatacatacagctccaaggagaagacctgccaagatgtggacgagtgccagcaggatcgctgtgagcagacctgtgtcaactccccaggcagctatacctgccactgtgatgggcgagggggcctaaaactatccccagacatggatacttgtgaggacatcttaccatgtgtgcccttcagcatggccaagagcgtgaagtccttgtacctgggccgcatgttcagcgggacccccgtgattagactacgcttcaagaggcttcagcctaccaggctgctggctgaatttgacttccgcacttttgaccctgaaggagtcctcttcttcgctggaggccgttcagacagcacctggattgtcctgggcctaagagctgggcggcttgagctgcagcttcggtacaatggcgttgggcgcatcaccagcagcgggccaaccatcaaccacggcatgtggcaaactatctccgtggaagagctggaacgtaaccttgtcatcaaggtcaacaaagatgctgtaatgaagatcgcggtagctggggagctgtttcagctggagaggggcctctatcacctgaatctcaccgtgggcggcattcccttcaaggagagtgagctcgtccagccgattaaccctcgcctggatgggtgcatgaggagttggaactggctgaacggggaagacagcgccatccaggagacagtcaaggcaaacacaaaaatgcagtgcttctctgtgacagaaaggggctccttcttcccggggaatggatttgctacctacaggctcaactacacccgaacatcgctggatgtcggcacggaaaccacctgggaagttaaagttgtggctcggatccgccctgccacggacacgggggtgctgctggcgctggtgggggacgacgatgtcgtcatctctgtggccctagtcgactaccactctacaaagaagctcaagaagcagttggtggtcctggcagttgaggatgttgccctggcactgatggaaatcaaggtgtgcgacagccaggaacacacggtcactgtctccctgcgggagggtgaggccaccctagaagtggatggcacaaagggccagagtgaagtgagcactgcccagctgcaggagcgactggacacacttaagacacatctgcaaggctctgtgcacacctatgttggaggcctgccagaagtatcggtgatttctgcacccgtcactgcgttctaccgcggatgcatgactctggaggtaaacgggaaaatcctggacctggatacggcctcgtacaagcacagtgacatcacctcccactcctgcccgcctgtggagcatgccaccccctagaccgagctgcaagagggctccacacctaaagacaaaaatgaagcagggtttggacacacagcactggctcctctcgcatggtcctgcaacactggagcagcgtggaccgcccttgtggtttttttttcttgagatctttctttttgccttgtaacatatctgtacataatggacgggtgtcgggtcaccggctgctcagagagagccacgtgacctggtgggagctggctggaaggggctgggctagaggggctggcagtttgcagcagaacggatgtgaagaaaataattctctattatttttattactacatgcttctttctgactctaaaatatggaaaataaaatatttacagaaacctttttaaaaaaaaaaaaaaaaa

SEQ ID NO: 358 - DNA, 2861 bp, Mus musculus
gaagactttctagaagtcggaactgtgaagggctcccgactgagagccagaaggcacagagaagcctgaggattctcatttaactctgggaactgcttcaagaagctacagtaccatagaagacctgggaagtgtgagaatttctgcaactgggaccaaaatgtctttcatagatccttatcagcacattatagtggaacaccagtactcccataagtttactgttgtggttctacgtgccaccaaagtaaccaaggggacctttggcgatatgctggacactccagatccttatgtggaacttttcatctctacaacccctgacagcaggaagcgaacgagacacttcaataatgatataaaccccgtgtggaatgagacctttgagttcattttggatcctaatcaggaaaatgttttggagatcacactgatggatgccaactacgtcatggatgaaaccctaggcacagctacattccctgtatcttcaatgaaagtgggagagaagaaagaagtcccttttattttcaaccaagtcactgaaatgattctggaaatgtctctggaagtttgttcatgcccagacctacggttcagcatggcactgtgtgatcaggagaaaactttcagacagcagaggaaagagaacataaaagagaacatgaagaaacttttgggtccaaaaaagagtgaggggctttattccacacgtgatgtgccggtggtggccattttgggttcaggtgggggtttccgggccatggtgggattctctggtgtgatgaaggcactgtatgagtcggggattttggactgtgctacatacattgctggtctttctggatccacatggtacatgtcaaccttgtactctcaccccgattttccagagaaaggtcccgaggagattaatgaagagctaatgaaaaatgtcagccacaaccctctcttacttcttacaccacagaaagttaaaagatacgttgagtctttatggaagaagaaaagttctggccagcctgtcacctttactgacatctttgggatgctaataggagaaacactaattcaaaataggatgagcatgaccctgagtagtttgaaggaaaaggtcaatgccgcccggtgtcctttgcctctcttcacgtgtctccacgtcaaacctgatgtgtcagagctgatgtttgccgattgggtggaatttagtccatatgagattggcatggcaaaatatggtacctttatggctcctgacctatttggaagcaagttttttatgggaacagttgtaaaaaaatatgaagaaaaccccttgcatttcttgatgggtgtctggggcagtgccttttctatactgttcaacagagttttgggagtttctggctcacagaataaaggctctacaatggaagaggaattagaaaatattacagcaaagcacatcgtgagtaatgacagctccgacagtgatgatgaggctcaaggacccaaaggcaccgagaatgaagaagctgaaaaagagtaccaaagcgacaaccaagcaagttgggtccatcggatgctaatggccttggtgagcgactcggctttattcaatacccgagaaggacgtgccggaaaggtgcataacttcatgctgggcttgaatctcaacacatcatatccactgtctcccctgagagacttcagctctcaggattccttcgatgacgagctcgacgcagcggtagcagatccagatgaatttgaacgaatatatgaaccactggatgtcaaaagtaagaagattcatgtggtagatagtgggctcacatttaacctgccgtatcccttgattctgcgacctcagagaggtgtggatcttatcatctcctttgacttttctgcaaggccgagtgacaccagtccccctttcaaggaacttctgcttgcagagaagtgggcgaaaatgaacaagcttccctttccaaagatcgatccttatgtgtttgatcgggaaggattaaaggaatgctatgtttttaaacctaagaatcctgatgtggagaaggattgcccaaccattatccactttgttctggccaacatcaacttcagaaagtacaaggccccaggtgttctaagggaaaccaaagaagagaaagaaatcgctgactttgacatttttgatgaccccgaatcgccattttcaaccttcaactttcagtatcccaatcaagcattcaaaaggctgcatgatctgatgtacttcaacacactgaacaacattgatgtgataaaggatgccattgttgagagcattgaatacagaagacagaacccatctcgttgctctgtttccctcagtaatgttgaagcaagaaaattcttcaataaggagtttctaagtaaacccactgtgtaatttctgtgctgggatgatcaagccatttgaattccatgacaatttgagttcagaacacattagaggtcatcttactatgcagaagagactggctgctactcagagttgtggagatttagccatgtgttaggtgaaaatgatgttgattatgtaatacttagcaacagtttctgacagtatgaattttttgacattagcatagagctatatactgtattttaaacattcctcacattttttacctgtactttttatataaatatgacatgtcttttcttttgaaaatatttaatagtttaactcagtaaaagagacttcccattgtgtgtgaatgttattccgaactagatttgttcatgccatgttacaacactatttttatttaaatgtttatatttacacatacgaaataaatactttgctgtacaaattaccactaaaaaaaaaaaaaaaa

SEQ ID NO: 359 - DNA, 1885 bp, Mus musculus
ccggccggcggcaaggcggaaggactttttggactttgagcctccggttctcacctataagatcctgaacccccctggcccggcacgtccgagattgcagaatggaggccggactgctatggttctgcaactggagcacgctgggcgtctgcgccgcactcaagctgccgcagatttacgcgcagctggcggcgcgcagcgcgcggggcatcagcctccctagtttacttttggagctggcggggttcctggtcttccttcgttatcagcattactatgggaacccactgctcacctatctggaataccccattctcatcgcacaagacattgtcctcctgctcttcgtctttcatttcaatgggaacgtgaagcaagccttaccctacatggccgtatttgtgtcttcttggttcatcctcagcctgcagaaatggatcatcgacttggccatgaacttatgcacagtcattagtgcagccagtaagtttgcccagctccagtatttgtggaaggtacaagattcaggagctgtgagcgcactgacctggggcctttctgcctacacctgtgcaacaagaataataacaactttaatgaccaccaatgacttgacaattcttatacgttttgtgatcatgttggctttaaatatatgggtaacagcaacagtacttcactaccggaagtctgtcaccaaagctgaatgatggatgtcttcttcctacacacagtggacttcaaacgactggaccagatgatgcaccattgctttccattgctacatttaaaatcttttactagtcaaccatttcagaaactttaaagcaggtttgttaaacttgaaaaagccacttagctgaatacgggaagtgcaaacctataatcccagcacttgggagtctgaggtagcctgggctacacagcaaactcagagaaggaagactaggagagacggaaagagacacttgtataaaatgccaacttccttcccccagtgccctaggttgtggaagggcttagattgggttgtgtgtggttttttgtccctcccttccccacaagataaagtctcgctatatagcccaagctatcctccaacctgtgatcctccagcagccttttgagcactgggagtgctggacaagagtggaccactcttgactttgacaactcaaatgatggaacctgcccaagaggccatcttcacccttaaagtcatgattatattccccgaagagccagctacagctacactgtggctttcagaatattaagtagtcttcccacaatgagtggggtctgctcagtaacaagtggaactgttcacacctgggcagtttaactcttccataaacataatgcagtataacatcctctcaagctaagcagggctagcaaagtatgcagagatggaactgggttcatataccaagcagtcgtccaacacagtgtgccttactaaacagagccccatctgtttagacgaggaaatctcaactgtctctctatttaagcacaatcccaccattttttaaagggctatatctcacaattaccactgttggaactttgtataagttttagttactggaaggtatacatacagtaaaaagtattgctaagtcctagccaattcttaggtattttattcatactaaagtaagaatatcctaagcatatcctaaacactgttgtctgcagtacttcctctgatgttttataaatccagcctttaaaagctcagtttcttcttctaagtgaatgtcattactctggtatactgcaagaaagtaaatgaagtttactgaaaaatgtttagttttctatatttaataaactttaatttgttgaacgcccccgaaaaaaaaaaaaaaaaaaaaaa

SEQ ID NO: 360 - DNA, 2851 bp, Mus musculus
ggtcccgccaggtcctggattccacgagaagtcttgcagctctgtggcagacaggaggtcaccgtattctgcgttccggtcgtcagcccaattcctagcggaatagagcaagacggcggcagcgaaccaagcccaccatggcagcgaactattccagtaccagcagcaggaaagaacatgtcaaagtgacttctgagccccagccaggcttcctggagcggctgagtgagacttcgggcgggatgttcgtggggctaatgaccttcttactctccttctacttaattttcaccaacgagggccgagcactgaagacagccacatcgcttgcagaggggctgtcactcgtggtgtcccctgacagcatccatagtgtagctccggagaatgaaggaagactggtacacataatcggggccctgcggacttccaagctcttgtctgacccaaattatggggtccatctaccagctgtgaaactgcgacggcatgtggagatgtaccagtgggtggagacagaagagtccagtgagtacacggaggacggacaggtgaagaaggagacaaagtactcctacaacacagagtggaggtcagaaattgtcaacagcagaaactttgaccgagagattggccacaaaaaccccagtgccatggcagtggagtctttcacagcgaccgccccctttgtccagattggcaggttttttctctcagcaggcctcattgacaagattgacaacttcaaggccctgagcctggccaagctggaggacccccatgtggacatcattcgccgcggagactttttctaccacagtgaaaaccctaaatacccggaggttggtgatgtgcgagtctccttttcttatgcgggactgagcagcgatgaccctgacctgggcccggctcacgtggttactgtgattgcccggcaacgaggtgaccaactaatcccatattccaccaagtccggggacaccttgttgctcctgcaccatggggacttctcagctgaggaggtgtttcgtagagaacagaagagcaattccatgaagacatggggcctgcgggcggctggatggatggccatgtttatgggcctcaacctcatgacacggatcctctacaccctagtggactggtttcctgtcttccgagaccttgtcaacattggcctgaaagcctttgccttctgtgtggccacttccctgaccctgttgactgtggctgctggctggctcttctaccgaccgctgtgggctgctctaatcggctgcctggctctggtgcccattatcattgcacggacccgggtgccagccaaaaagctggagtgaagcctgagaggccagattccctgtcacctctgcccagctcagctggatcaggcatctacacaccccattcttccaggggccagtgtccacacctgcatgtagggattcggtgtcctgcttaatgccttcccctctcgggcttcattccacccagctgtcagctgacctgcgggtgaagggctcagccttctcacccatccctcattgctggaaccaagtgccaagactaccacaaccatcagctacaactgcaacctgagaaaacagacatcaccctctactgcggggccacaccacatcagtaggacaccccatacccaggcttggaggagtgcacgccacaccaagcctctgggtagaatctgatgtggcctgaagaaaccctgaaggtcactgtcactgtggcgggacagagtgcttcggtataagcccgcaggcttctggttcttggttctattatgccacttctccggttctttctatcccaaggagagtgtgactgggtcacactcacagttgctgttactgaaatgaactctgcaggaatggtgtttcagcgggtgcggcttgactggtttgagttcccgaggccaaggggaagctttagctttgctctgcttttgaaccagtgttgggggattccctgtcgtgctgggttgggactgtggaggcggcaccctctttatcccctgctatcacaggtgatctgttcacttgaaggtgatttttatcttgtagtcagtgttacaagaaaaggctggaagcatttctactaagcgaggccctttacagtgacctccaggcaactgaagtcaagaatcaggactcgggcttgctgcaggaggcccacgtctggcctttttctgtgggacacttctgaccttgacactccggcctcaagcagttgctgcagagtggttctttttgcatttaatgcccatcactatcctcatcccaaataaaatccattcatactagtggacatcatttctaagtttccttgctactgttacaccctttgaacggatgctttagctctgatgtcgtcacagagccttggtttatcctgtacctgtcatttctgtttgcaactggttgctgtagcaacaagagtgtttggtagctgaccaaggtgtcaggatccctgaccctagcgatacttaacagttcttcccatgtcctatggtatctgtgcttttggctgggtaaaagtacagccagagacggcttactgggtttagaatggaaacaacattcactactgttcagtgcatgctggtacaatctcttagaaactcctaagatggtttgggaaaatacagtgcaattagtgatggctaaatacacagtgcttgggattcagtctgtgtaacattttcttctgtgttttttaccagccagctcaaaagttaagagcaaattatggaagaataatttgatgtctttgagaaaccatgaggtttctttgtattaaaatttgaaataaatttctacttatcttttggtattgg

SEQ ID NO: 361 - DNA, 7046 bp, Mus musculus
cgcctgagttgcccgcgacggctctgcccgccgacggcacgtctctcggcggccgcgcgttccggggaagttacgtgcgggagcaggctttggaggagacgcccgagggtgtaggggacagccggaggcccgggtactgcggagcggcgagccggcggagggcggcggaggccgagcaggcggccgggtgtgccccgcggagaagcccgggcggggcggacgcttcccggacttttgtcccacttgaatcccctccccgtgggccgggcctttccggcctcccccgcccctgccccgctcgtccccgggagatgtttatgcggacggtggcgtgaggagcgggcgggccggcggcgcggagtttcgggtccgaggagcttcgcgcggcgcggagagagacaagatgtccgccagggccgcggccgctaagagcacagcaatggaggaaacagctatatgggaacagcacacagtgacgcttcacagggctcctgggtttggatttggaattgcaatctctggtggaagagataatcctcattttcagagtggggaaacctccatagtgatttctgatgtgttaaaaggagggccagctgaaggacagctacaggaaaatgaccgagttgcaatggttaacggagtttcaatggataacgttgaacatgcttttgctgttcagcagctaaggaagagtgggaaaaacgcaaaaattactatccgaaggaagaagaaagttcagatccctgtaagtcacccagatcctgagccggtgtctgataatgaagacgatagttatgacgaagaagtgcatgacccaagagctggccgcggtgctttagcgaacagaaggagcgagaagagctgggcaagggataggagtgcaagcagggagaggagcctgtcccctcgctcggacaggcggtccgtggcctccagtcagcccgcaaagcccaccaaggtcacactggtgaagtctcggaaaaatgaagaatatggtcttcgaccggccagccacatatttgtaaaggaaatttcacaagatagtttggcagcaagagatggtgacattcaagaaggggatgttgtcttgaagataaatggtactgtgacagaaaatatgtcattgacagatgcaaaaacactgatagaaaggtctaaaggcaagttaaaaatggtagtgcaaagagatgagcgggctaccttactgaacgtccctgacctttcggatagtatccattctgctaatgcctcggaaagagatgacatttcagaaattcagtcactagcgtcagaccattcaggtcgctcgcatgacaggccaccccgccgcagccagtcacgatctcctgaccaacgttcagagccctccgatcattccacgcagtctccacagcagcccagcaatggcagtctccggagcagagaggaagagcgaatgtctaaacctggggccatctcaactcctgtaaaacatgtagacgatcatccacccaaagcagtggaagaagttacagttgagaaaaatgagaagcagacgcccactcttccagaaccgaaacctgtgtatgctcaagttggacaaccagatgtggatttacccgtcagcccttctgatggtgctctgcctaattcagctcatgaagacgggatacttaggcccagcatgaaactggtaaaattcagaaaaggagatagtgtgggtttgcgactagctggtggaaatgatgtcggaatatttgtagctggcgttctagaagatagccctgcagccaaagaaggcttagaggaaggtgatcaaattctcagggtgaacaatgtagatttcacaaatatcataagggaagaggccgtccttttcctccttgacctccctaaaggtgaagaagtgaccatactggctcagaagaagaaggacgtttatcgccgcattgtagaatcagatgtaggagattcattctatattagaacgcattttgaatatgaaaaagaatctccttacggacttagttttaacaaaggagaggtgttccgggtcgtggatactttatacaatggaaagctgggctcttggcttgccattcgaattggcaaaaatcataaggaggtagaacgaggcatcatcccaaataagaacagagctgaacagttagccagtgtacagtacacacttccaaagacagcgggtggtgatcgggcagacttctggaggtttcgaggtcttcgcagctccaagagaaatcttcgaaaaagcagagaggacttgtcagctcagccagttcaaactaagttcccagcttatgaaagggttgttcttcgagaagctggattcctaagacctgtaaccatctttggaccaatagctgatgttgccagagaaaagttggcaagagaggagccagatatctatcagattgcaaaaagtgaactacgagacgctgggactgaccatcgtagctctggcatcattcgccttcatacaataaagcaaatcatagatcaggataaacatgctttattagatgtaacgccaaatgcggttgatcgtcttaattatgcgcagtggtatccaattgttgtgttccttaaccctgactctaagcaaggtgtaaaaacaatgaggatgaggttgtgtccggagtctcggaaaagcgccaggaagctatatgaacgctctcataagcttcgtaagaacaatcaccatctcttcacaactacaattaacttaaactcaatgaatgatggttggtacggtgccctgaaagaagcgattcagcagcaacagaaccagctggtgtgggtctctgaggggaaggcggatggtgctacaagtgatgaccttgatttgcatgacgatcgtctgtcctacctgtcagccccaggtagtgagtactcaatgtatagcacggacagtagacacacttctgactatgaagacacagatacagaaggcggggcctacactgatcaagaactagatgaaactcttaatgatgaggtggggactcccccggagtctgccattacacggtcctctgagcctgtaagagaggattcctctggaatgcatcatgaaaaccagacataccctccttactcaccacaagcgcagccacaagctattcatagaatagactcccctggacttaagccagcctctcaacagaaagcagaagcctcatctccagtcccttacctttcgcctgaaacaaccccagcatcatcagcctctgcagttaatcataatgtcagtgtaactaatgtcagcctggaggagcctgccccagcccctcccacctcgcacgcatcacagcctggttgtttaggagcaccaagtgctgaggcagctcacgtaggtctcagaggtgaaggaccaccattgccgccgcatgcagacccagcaaaggtgtacaggaaggagccatattctgaagaaatgatgagacaaaaccatattttaaaacaaccagctcttggtcacccagggcagaggccagataaagagccaaatctagcctatgaaccccaacttccatatatagaaaaacaagccagcagagaccttgagcagccgtcatacaggtatgaggtctcaagctacacagaccagttttctcggaactatgaccatcgcctacggtttgaagatcgaatccctacctatgaagaccagtggtcatattatgatgacaaacagccctaccaacctcggccttttgagaatcagcatccccgagacctggactccagacaacatcccgaagaggcttcagaacgaggttatttccagcgttttgaagagccagcccctctgtcgtacgacagtagaacacgctatgagcagctgcctcgaacctctactctacgacatgaagagcagccagcccctgcatatgaggtgcacaacaggtacaggccagaggcacagccctattcttcaacaggccctaagtcatctgagcccaagcagtactttgaccagtacccgcgaagttatgagcaagttccaccaccaggctttacctccaaaacaggccattacgagcctctccatggtgctgcagttgtccctcctctgataccttcctctcaacaaaagccagaagtcctgcgctcggctaccaaaccacagcctccacccccaaccctaactgaggaggaggaggatccagcaatgaaaccacagtctgtgctcaccagagtcaaaatgtttgaaaacaaaagatctgcgtctttggagaacaagaaagatgtgaatgacactgccagcttcaagcctccggaagtagcatctaaacctccaggtgcttctcttgctggccctaaacctgtccctcagagtcagtttagtgagcacgacaaaacgctctacaggctcccagagcctcagaaacctcaagtgaagccacccgaagatattgttcgatcaaatcattacgaccctgaagaggatgaagaatattaccggaaacagctctcctactttgaccgaagaagttttgagagcaagccttctgcacatcttcctgctggccatcactcagagcctgctaagccagtccattctcagagccagcccaacttccctagttactcttcaaagggaaaacccgaaactgatgctgtggatagatcattcagtgagaaacgttatgatccagcccaggccacgcctcctcctcctccgttgccctcacagtacagccagccagctccacctctgtccagctcttctctccacatacattccaagggcgcccagggtgaaggcaactcagtatcattggattttcagaactcatatatgtccaaaccagacccacccccatctcagagtaaaccagcaactttcagaccaccaactcgagaagacccccctcagactttctatccgcagaaaagtttcccagacaaagctccagttaacggagctgagcagactcagaaaaccatcactccggtgtacaatcgattcacaccaaagccgtacacaagttctgcccggccatttgaacgcaaatttgaaagtccgaagttcaaccataatcttctgccaagtgaaactgtacataaacctgaattgtcttcaaaaactcccacttccccaaaaactcttatgaaagctcatagttcaacacagcctccagagtttggcagtggagttgaaactttctctgttcacacagataagcctaaatatcaaatgaataatatcagcaccatgcctaaagctgtccctgtgagtccttcagctgtggaagaagatgaagatgaggatggtcatactgtagtggctacagctcgtggcatttttaacagcaatggtggtgtgttgagttccatagaaaccggtgttagtataattatcccacaaggagccattcctgaaggaattgagcaagaaatctatttcaaagtctgcagagacaatagcattctcccacctttagataaagagaaaggtgaaactctgctgagccccctagtgatgtgtgggccccatggcctcaagttcctgaagcccgtggagctacgcttgccacactgtgaccctaaaacctggcaaaacaagtgtcttcctggagatccgaattaccttgttggagccaactgtgtttctgtcctgattgaccacttttaattcttagtgtataggaactggactaagcaatgtgaacgtggattgaacttactaaatctaaatggaaccactctaatgagtattatattttcttagaatttatactgcaattggtagtattaagcatttgttggaactgatgaaggttagcgagcatgcccctgagccacggtcagaaagcatgctacaagctatgtgttattgagtgaagaactgtcaggcattggctagaggttcaaagatatttttgctttgtaatgatttttgtacttttttatggtcactgcttaacttcacatactgatttccgttaaaaataccagccagtaaatgggggtgcatttgagttctgttctttccaaagtacactcaaagtttattatggccttggcctagcatacacattttattttattatacatgaggtaatgtgcacacattttttacaaatgcacctggaatatataaccagtatagtggatttaacagaaatgtacagcagggggatttataacttggggagggagggtcaaatgaagacaattacttattgtatatgaaaacacatttcttttagggaaggacaccaaagcatgtgagcccggttcatggcctctgaatctataaattaacatatcaccacagacatgtaaccagcaggaatgccttaccctagtgggtttaattcttccatcatttcgctgtgtattactaagtttttatgagttctgtgcatatctagatactgtaccatggaaaagactgagtagattgtggacttgatggtttcagaaatgtgcaaattacctggaagaaaataatggtgtgacttaaaatatttttttgacagggggagtggcagtcttctgttctttgggctgtgcatctgagatgtttgatgctttcaggacgcatgtacataatgcgtgcataccacttttgttcttggtttgtaaattaacttttataaactttacctttttatacataaacagaaccaagtttctaaggctacctttgtattctctcctgtacctcttgagccttgaactttgacctctgcagcaataaagcagcatttctacacatacaaggtcatttttctaagaaaaagaatgcacagagttgttacatttttaagtgctgcatttaaaagatacagttactctagtttgattaaattcttgcaaagtatcccttctgtaaaatttgtgatacaatactgtgccctaaagtgtatttttttactaatagacagtttattatggcacatcagcacgatttctgtttagataatacaccactacattctgttaataatcagtaggtgtgaaaggatttcttttgtggttattaaaaaaaaatctcaaatttctaaatctgcaagaataaaactttttaaaat

SEQ ID NO: 362 - DNA, 5645 bp, Mus musculus
ctagaggaggggactgggagaagcgtgaacggcggccccccgctgcccttgcattcatgggcttgcccagctttacctgtcctctttaaccaggatggtgtttaaggcctcgcccttttctgtagcgctggcgtggatgctgccatcgcctggtctttggagactcggttgctttttaatggcagcagcggctgttgggtgaacaactacagactaagagtttgttttgacgggagggttgcttttgcttggcgccatcactgctggattggtccttcctggcccttcctctgttgaagggagaagatgccactgccatttggattgaaattgaaacgcacccgacgctacactgtgtccagcaagagctgcctggttgcccggatccagctgctcaataatgagtttgtggagttcactctgtctgtggagagcactggccaggagagcctagaagctgtggcccagcgcctggagctgagagaggtcacttactttagcctctggtactacaacaagcagaatcagcggcgctgggtggatttggagaaacccctgaagaagcagctggacaagcacgcactggagcctaccgtctacttcggcgtgctattctatgtgccttctgtttcccagctgcagcaggagattaccaggtatcagtattacctgcagctgaagaaagatattctggaaggaaaccttccctgtacattagaacacgccattcagctggccggcttagctgttcaagctgattttggtgactttgatcagtatgaatcccaagattttcttcagaaatttgccttgctccccgtggcatggctacaggatgaaaaagtgctggaagaagcagcccagaaagtggccttactgcaccagaaatacagagggctcacagctcctgaggccgagctgctgtacatgcaggaggtagagagaatggatggctacggagaggagagctaccctgccaaggacagccaaggaagtgacatatccattggtgcctgtctcgatggtatctttgtgaaacacaagaacggaaggcctcctgtggtgttcaggtggcacgacattgctaacatgtcgcacaacaagtccttttttgcactagagctggcaaataaagaggagaccatccagtttcaaactgaagacatggagacagccaagtacgtgtggcggctgtgtgtggcacggcacaaattctacagactgaaccagtgtagcctgcaaacgcaggccgccacgctgaactcagtcaggagggactcatcctctaggatgtctctgcctaaaccccagccctatgcgatgcctcccccaccccagctgcattataatggacattatacagagccatttgcttcttcccaagacaacatctttgtgcccaacaagaatggattctactgtcactcccagacaagcctggatagaacccagattgacctcagtggtcgcatccgcaacggcagcgtctacagtgcacacagtacgaattccttaaacacacttcagccctacctgcagccctcccccatgtcctccaacccgagtatcactggcagtgatgtcatgagacccgactcactcccgtcccaccggcacagtgcgctcattcccccgtcttaccgcccgacccctgactatgagaccgtgatgaagcagctcaacagaggcatggtgcacgcagaccggcacagccactcgctgaggaacctcaacattggcagttcctatgcgtacagccggcccgacgctttggtctacagccagcccgagattcgggagcaccctcacctcacctctccccagtcagcccactacccctttaacctgaactacagtttccacagccagtctccgtatccctaccctgccgagaggcggccagtggtgggcgccgtgagtgtgcctgagctgacaaatgtgcagctgcaggctcaggactacccagctccaaacattatgagaacccaggtgtaccggccacccccgccgtatccttacccaagacctgccaacagcaccccagacctgtcccgccacctctacatcagcagcagcaatccggatctcatcaccaggcgcgtccatcactcagtgcagaccttccaggaggacagcttgcccgtggctcactctctgcaggaggtcagcgagcccctcacagcagcgcgccatgcccacctacagaagaggaacagtattgaaatcgcagggctcacacatggattcgaaggcctgaggctcaaggagaggacggtgtcagcctcagcagcagacgtggcgccccggaccttctcagcaggctcccagtccagcgtcttctctgacaaaatgaagcaggaggggactgaagagcaggagggtggcagatacagccataagaagtccctttctgatgccaccatgctgattgatagcagtgaggaggacgaggacttggaagaggacagcagcagagaacaggccatctcagctgtgtctgagccccgccttacggccgctttctctcaggaactaaactacccctgtgcttcagcgactccgatcactgggcctctgcatatttttgagcccaagccccatgtcacagagcctgagaagagggcaaaggacatcagccctgtccacctggttgtggagacccatcggccccgaagagatggactgctgaccccctccatgtccgagtcagacctcacgacctcagggaggtaccgagctaggagggactctgtcaagaaaaggccagtgtcagacctcctctctgggaaaaaaagcgctgtggaaggacttccgccactaggggggatgaaaaaaactcgagcagatgcaaaaaaaattggtcccctcaagctggcagccctcaatgggctctccctgtcccggctgcccctgcctgatgaaggaaaagaagtgtccaccagagcgacaaatgacgagaggtgcaaggttctggagcagcggttagagcaaggcatggtcttcaccgaatatgagaggatccttaagaagcggctggttgatggtgagtgctcgactgcccggctccctgaaaatgcagagagaaatcgatttcaagatgtgctcccctacgatgatgcgagagtcgagttggtgccaaccaaggagaacaacactggctacatcaacgcgtcacacattaaggtctctgtcagcggaatagaatgggattatattgccacacagggaccattacaaaatacctgccaggacttttggcagatggtgtgggaacagggagtcgcaattatagcaatggtgacagcagaagaggagggaggccgggagaagagctttaggtactggccacggcttggttccaggcacaacactgtcacctatggaaggtttaagatcacaacgcgcttccgcacggactcgggctgctatgccaccacaggtttgaagatgaagcaccttctcacagggcaggagagaaccgtttggcatcttcagtacacagactggcctgaacacggctgtcccgaagacctcaaaggatttttatcctaccttgaagagatccagtcagttcgacgtcatacaaacagtaccagtgaacccaaaagccacaatcccccgctgctggtgcactgcagtgctggcgtgggaagaactggggtcgtcattctgtcagagatcatggttgcctgtctggaacacaatgaggtgctggacatccccagagtgctggacatgctgaggcagcagaggatgatgctggtgcagacacttggccagtacacctttgtgtacagagtgctcattcagttcctgaaaagctccaggctcatttaagctccaacactgtttttatggggacccaatcatgcaaagtgtttacagctttaaaaaaaggaaagaagaaagcgcacgtcctactttgttcccagtagtcccgcgtagggatcctgacccggcagtgtgctaagcaagaggccaggaggtctgtgggacctggcccaggctgacgaggcactgctgccccggccacagctgcccagtttgctgcacttgcacaaggtctggagattgtattttctagacagttctctgtcttactgaagctgcactgggcagttctggcaatcatttaggcacagacttctatcttaaactattttttgataattgtaattttatgactaaatagggctttttcttttttagctagaagctgagcttttatggtgggacatccacagattgtgtggttctcgagtgactatttaaaaccattataagcttttgtttaagtacaaaaaacatgggggaactaagtgttttattcatgaagtccaaaactaaagaaatctaaaagtgttattttgaaacatagaaagcatttttatattcagaatattttttaaaagttatatatttgtaccttctatattttccaaataagagctcaatttgttatgatactgagttaatgtaaagttggggataaagcacgttatttaaaactctaacaatcagattcactattttttcagtattaataagcataaattgagtttgatttttattgactgaaaatgaagaaagcaaatgcataggatgggtttaagcacttttttttgtttgtttgttaaaaacgagttcgatatatgtggctttatattttaaacaccagtggacattttccaggagaagggctctgagtacgtaagctgaccgggggaagtgtaagtgcatgcagtgctcacacaaaaggcgtggccgtacgcaaatgcagtgttacgcccacaccgggagctgacacggagtggaagttaagggctgctccgcacagggaactcaaggcctgccaccttccgtgactgattgtttattggggttcttcctgtcttttccccacaagcaagctcacgtttacattgccatcagagaaccccgaagaggctttgtttcctttaggttgaaagaagaaaacggttaacgtgaggtttcttttcctaaaccacagcccaaactgatggggccaccagaaactgctgtggtgttcaggcggtacttgaatttagcaccgtaatcctgtcctcccccccccccccccccggaccagttctaaggtactcggcctccctcttccatcctatttggttgggcacattctctattggtcagaagtgtgtcaggtttgaagcagaaagtgttcttggcccaggctcagtctcctttgggagatgtggaggacaagctggcaggcttaactgaggtgtgtcatgttcatgtgtgtccgtgcccccgaatcctaggctgccgcttcacagtgtagaccttctagaatgtccgatctaggactagctcccaaatgatactgtcctgccatcattctgatttgactgtttgtggtgagcatcgccctccatgacaactgtgctagcccagctaagcacagtggactccagtggacagcaccccagggtggggttgtgtgctctagtttccatctcaagcctgtgacggacaggacttttgtcaagtttgccccaatggtacgctgtttgaagaggctttcctgtcacctgagcatttggaaatttcccactgacaagaacattgtaaaacaaaactttaattaaagagtaatatatggc

SEQ ID NO: 363 - DNA, 545 bp, Mus musculus
cgtctctcgggtggagtcttctgactgctggtggagcaggtctcaggaatctcttcgcttcagcttcaatcatggcctgtggtctggtcgccagcaacctgaatctcaaacctggggaatgtctcaaagttcggggagaggtggcctcggacgccaagagctttgtgctgaacctgggaaaagacagcaacaacctgtgcctacacttcaatcctcgcttcaatgcccatggagacgccaacaccattgtgtgtaacaccaaggaagatgggacctggggaaccgaacaccgggaacctgccttccccttccagcccgggagcatcacagaggtgtgcatcacctttgaccaggctgacctgaccatcaagctgccagacggacatgaattcaagttccccaaccgcctcaacatggaggccatcaactacatggcggcggatggagacttcaagattaagtgcgtggcctttgagtgaagccagccagcctgtagccctcaataaaggcagctgcctctgctccccatataaaaaaaaaaaaaa

SEQ ID NO: 364 - DNA, 5128 bp, Mus musculus
cagacacctctgcgacgccagcttgaaaactgccagcgggctgggatttaactccactttatcaactcccacccccgacccttctcaactgcaaccccaactccgtgagaaagccctgactttgcggggtcccaggtgcaaacttgagacacttttgtccctgtcctccatcctaatctaagtttaggctctgattgagtcaagagtaggtgctaaagcagcgggcctcaggtgtctaggtctcggggtccctggggactctcaggttgaagccttgccagaatctgggcagaggctccagagcttctcccagatcccgctgctctacaccgctggaaaccacgcttcatcgcagcatggccaccagccttagtgcagacagtccacagcagctgagctcgctgtctacccagcagaccactcttctgctactcttctccgtcctggccgccgtgcacttaggccagtggctgctgcgacagtggcaacggaaaccgtggtcctcgcccccaggtccctttccttggccactgatcggaaacgcggcggctgttggccaggcgtcgcacttgtacttcgctcgccttgcaaggcgctatggcgacgttttccagatccgtctgggcagctgtcccgtggtggtgctgaatggagagagtgccatccaccaggccctggtgcagcagggcagcatcttcgcggaccggccgcccttcgcctctttccgtgtggtgtctggtggccgcagtctggcgttcggtcactactctgagcactggaagacgcagcgacgctcggcctatagcacgatgcgtgctttctccacgcgccacccgcgcagtcgcggtcttctcgagggccacgcgctggcagaggctcgagaattggtggcagtgctggtgcggcgctgtgcgggcggcgccttcctcgatccaacgcagccggtcattgtggcggtggccaacgtcatgagcgctgtgtgcttcggctgtcggtacaaccacgacgatgcggagttcctagagctgctcagccacaatgaggagttcgggcgcacagtgggtgcgggcagcctggtggatgtgctgccctggctgcagctatttcccaacccggtgcgcaccaccttccgcaagttcgagcagctcaaccgcaacttcagcaacttcgttctggacaagttcctgaggcaccgcgaaagcctggtgcccggggctgctcctcgagacatgacggacgccttcatcctctctgccgaaaagaaagcgtctggggcccctggcgacgattcctccgggctggacttggaggatgtgcctgccactattacggacatcttcggagccagccaggacaccctttccaccgcgctgctgtggctgctcatcctctttaccagatacccggatgttcaggcccgcgtgcaggctgagttggaccaggttgtggggagggaccgcctgccctgcatgagtgaccagcccaacctgccatatgtcatggcttttctttatgaatcaatgcgattctccagctttttgcctgtcaccattccacacgccaccaccgccaacacctttgttttaggttactacatccccaagaatacggtcgtttttgttaaccagtggtctgtgaatcatgacccagccaagtggcctaacccagaggactttgatccagcccgcttcctggacaaggacggcttcattaacaaggcgctagccagcagtgtgatgatattctcagtgggcaaacggaggtgcatcggtgaggaactgtctaagatgcttctgtttctcttcatctccatcctcgctcatcagtgcaatttcaaggctaaccaaaatgagtcctcaaacatgagtttcagttatggcctgaccattaagcccaagtcgtttagaatccatgtgtctctcagagagtcgatggaactcctggataatgctgttaaaaagctgcaaactgaggaaggctgcaagtgagaggccggagggagctggaatgtttaaggaatacctatctcattaactggggaggaaatagattttttcccccagcttcatttttggcctcagctctcagcagtgaatggaaaccaagtggtctgaaggtggggcatgctcaccaattcatggctcctcttggacctgtgctggagttcctggaagtattttggaattgaagagcaaaagggcccaaggaatttggagcctgttgttttttgggtttttcagctaaacacatgcacacatatcaacatgtatgcacaactatctaagaaagtatttcagtaattctgcctttttgggtagatttgtgagggaacttctatgtgcagaaattgaccccataggaaactgcagtaagcaaaggcttaggatatacccaagattcaaagacatgtgatttcagtgtaaaatgtaaagaccagaagtcctcctaccaagagacagcttgcttggaaaaatgcttcaactcctttatagccctggatgaggctttctgcctgcctgttgatgggcctcccactttagaatggaccataaagtcagttgtcccctaagaatttatggctgatttaacaactgcagtaggttttagagattagcgaatttaaaggtaaattgtttaggtggtaaaaaatgtttataagttaaagccgaacctcatttgggtgctcagatgaagtattccagttataagggagaaaaagatttgctgggctagcttacggtttcaagtttgggattgtaatgaactggtttcagtaataagtctgataaactaaaaaaggaacccagtgttcccaaatagtattcaatgcatataaaaatttacctaactgctcataaacatcatatgaatattaactattcaatcaggaaaacacttgaataatatatttcttatgtcatattgcaaaccaaaaagtataatcagttgagtgaaatttgcccaattccaggaaacgagcctgactaaatcaatccgttttgacatcagggaactgagtaacagaacagtcttttcttatttatagttcatacaagggacaaatctcaaaactaaaccagcgaaatatgttctgatctggtaattgtagttacaacatggatggttcttttggaattgaccccattaatatgttaagcttacaaattcttggtttgcttcgatttttaaattagtttaaaatccatcttgattatttcgttccagttgaagctagagaaaatgtgatcattatctcgcagaaggtgagaaacctaacctttgcctaagaacaaatgccaaatgtaaaaataaataaatgataagtaaataaaggccatgaatgttctgggtgttcattagagaccatatgataggaggctcactacaaccagtaattggtagtttctttttccgagttcttactattgttgttgtagttgttttttaagttgagtattaaagtctgtgtgtcttttgtttttgtttttaaagtcagaatctgaagattgtcttgggaggttgtttaacaactgcttcttgagacagcagagatgcctaaaatcagtttcttttatttaggatggcacaccacgatgagcagccacttcctggaagctgagagaggttagaaatacatgtattccgattatgtaaacaatccgaaagccctttgagaagcgttggatgggtggaaaagtggggacagggcccgtggggggtttcccatttctgttttcatttcgattagcctgaacaaaagaagccctcagcactcagagagcttactgctggctctgtttcattaggcttcttggaattttcctatcaaaattacaaaggaaggggagtgcgatagtctctgtgtgcagaggctgcaagacagagaaagcatgaggagaagagagaagtctagatggtccccattcactccaaattagtttcctgaagtataaaatttgaggcatgaatgtttagacaaaaggagttttgagtggcaggctttaccttcaagtgtctcttaagagtggctggagccctggccctttcctcctatctcccccatctattttgtggttgcaagttgaattataaaaaattacaatgtaaaccttatttaaatttctccacaacagaaccccttgaatgtgatacgcaggttgtgtcagtattttaaaggccttaatttcaacaaaaattaactctatgcaataatttttaagtttttcagacattttaaaagcatgcgccttagtaaggctgggacggtgatttgagcttccatggcccttttactatgagaaatttacaatagtgaaagtcttcatgtatcagtctggactccttattaaaccaaccagacccggatgttttgtgaatgtaggggtcattttcatctgatgctttcagcaaaggagaaagtagagggggctactttgtttattatatttagaacctagtgaaaggaagaagggtacaagccaggaaagagtaataattgtcatatttggaagctcgaatagattacaggcttagtcagaaagcctgcttttgtttctgccacagagggacttcttttgctgctcaccatgttcctcagagtatctacttcagatcagtgcggcaaaagcatgtctcattaaatgcctcatctgtacagtatagcttggactgtgtcagaacgttgcttttccccccaaaacaaaaacagatgcctcaggtgtgtttgatggattaatcacaagaattcatgccccagaacttagccttgacctgtgaaatattagcacactcttatgcattcccaccagggctgtactacattaagcagatagatcaccatgtatgctaattagtatgcttttcgctgtgacacaattgtatggtaaaaggtgtatgttaccaggtgataataacccaggaataactccccatttagctgcttcttgtgttattgtactttgtcatatatgttcttaacatgtatatagctgatacagtgcacacagatcctccgtacacagaattaactaacatgtagcttctacctttgatataccaaaatttaaaatgttctgtcttcattatctctcatgaaacattgttacctaaacaataaaacccaatgtca

SEQ ID NO: 365 - DNA, 1441 bp, Mus musculus
  modified_base (26)..(26): a, c, g, t, unknown, or other
taaaaggcgacgccgcgcggcccgcntcgagtggccttgttctcgatacttcgttgtggttgtgaactctgtccggcagcctcgggcctgcggtcttgagacggagcaccatgcctacgataaagttgcagagttctgatggagagatatttgaagttgatgtagaaattgccaaacaatctgtgactatcaagaccatgctggaagatttgggaatggatgatgaaggaaatgatgatcctgttcctttaccaaatgttaatgcagcaattctaaagaaggtcattcagtggtgcacccaccacaaagatgaccctcctcctcctgaggatgatgaaaacaaagaaaagcggacagatgatattcctgtttgggaccaagaattcctgaaagttgaccaaggaacactttttgaacttattctggctgcaaactacttagacatcaaaggtttgcttgatgtcacatgcaagactgtggccaatatgattaaggggaaaactcctgaggagattcgtaaaaccttcaatatcaaaaatgactttactgaagaggaagaggcccaggtacgcaaagagaaccaatggtgtgaagagaagtgaactgctgtgcctgtcactgtaacactagaagggttgttccaaatgctagttgcactgctctgtttataattgttaatattagagatcagtagacaaacatcgccttgtcttcactgcatgtgtagttccagtccagatcagacctgtggctgagattcttctgtgagcagaagtttccttttccccccattactctgaataaaaccgaactatgggttctctgcggaaagtggcattttgggctttccctttctgtaaagtgatttctgcctctagttcattgtccagttaacttcagtgagcctttcaaagttgacattgtaaataaaacaacttaagaaaagtatgctgaaatagaattaacaaaacatgatacttgttcatgaatcggaaactggaatagggcagcttgaagttaaccatgtgggtgtcttccaacctctatgctgctggtaagcttgagtgcagctgggctctcttaattggatctgaggccttgttttttctttttttttttcttttttttttttttaatcttctcagctttgaatatgttgcctagagatttagtttactacccagtttgtggttttggagtgggaactgtaactcaacaatttgttagcttttcaattaaaaaagacacttacttcatgtggtatgtcatctttttatcatcattgttcccaggtggagaaacactacttgcatgtaaaaattaatttaaccttttaacattaaagtgtatggtaaaactcagaaaacagccatcctaagtgcaagatgcttttcaataaaaagtagtacaataggtagtaaacagttgcttttgtggatgc

SEQ ID NO: 366 - DNA, 1993 bp, Mus musculus
gcggacctgagagcttcccgcagagggccggcggtgggagcggagtgggtcgggcggggccgagccgggccgtgggccgtgtgggggccaggccgggccggcggacggcaggatgggctgcaccgtgagcgccgaggacaaggcggcagccgagcgctctaaaatgatcgacaagaacctgcgggaggacggcgagaaggcggcgcgggaggtgaagttgcttctgttaggtgctggagagtcagggaagagcaccatcgtcaagcagatgaagatcatccatgaagatggctactcagaagaggagtgccggcagtaccgtgccgtggtctacagcaacaccatccagtctatcatggccatcgtgaaggccatgggcaacctgcagatcgactttgctgatccccagcgtgcggatgatgccaggcagctgttcgccctgtcctgtgctgcagaggaacaagggatgcttcctgaagacctgtccggtgtcatccggaggctctgggctgaccacggtgtgcaagcctgctttggccgctcacgagaataccagctcaatgactcagccgcttactacctgaatgatctggagcgcattgcacagagtgactacatccctacacagcaggatgtgctgcggacccgtgtgaagaccacgggcatcgtggaaacacacttcaccttcaaggacttacacttcaagatgtttgatgtgggtggtcagcggtctgagcgcaagaagtggatccactgctttgagggcgtcacggccatcatcttctgtgtcgccttgagcgcttatgacttggtgctggctgaggatgaggagatgaaccgcatgcatgagagcatgaagctgtttgacagcatctgcaacaacaagtggttcacagacacctccatcatcctcttcctcaacaagaaggacctgtttgaagaaaagatcacacagagctccctgaccatctgtttccctgagtacacgggggccaacaagtacgacgaggcagccagctacatccagagcaagtttgaggatctaaataagcgcaaagacaccaaggagatctacacgcacttcacgtgcgccaccgacaccaagaacgtgcagtttgtgttcgatgccgtcactgacgtcatcatcaagaacaacctgaaggactgtggcctcttctgaggggcagtggacctggcaggatgggccaccgctgactgtgctccccactacccctgaggaagatgggggcaagaagaccatgttccctgcctgttcccccagctgcttctcccatcttttctctctgttctcagctcccctgtcccctccctcggctctagacttgggggaggggttgccacaggcctcccagtctaaaacccacctttgtctgaggtgccgggagtagccatggtacccccttcctgggcatccgttcgggttttctaaccgttgtcttgttctggggtgagcggggagcgcatgcagagatcccaaggcctatgtctggagggtaccaactcctccagcctagacccctggctttgtccaacaccagccctgacccaagtccaaatgtttacagggagcctcctgcctaccccactctctgccgctcggaggccccaaaggaaaaagcacaagaagcgtgagagataccgccattcctggagacaaagcccacctgcctaccccactctctgccgctcggaggccccaaaggaaaaagcacaagaagcgtgagagataccgccattcctggagacaaagcccacctgctcattctcgtagctttaaagaaaaagaaaaaggaaaaataaggaaaactgcaaatctagaaaactttttagagaaacctatttaaaactgtcaggtcctgaccagcacccccaccccaccttccacttaaagaaaaaaaatctcaaaataaatttctgaattatgcatcaaaaaaaaaaaaaaaaaaaaaaaaaaaaaaaaaaaaaaaaaaaa

SEQ ID NO: 367 - DNA, 2550 bp, Mus musculus
gggcggggcttcatttgcataacggccgccccttggtctccctgcccaaggctggcgtcaagcgcctcacccaactagatatcagttggaccaccggctggtcactccgaccagtcaggatgtctgcccgcggcccggctatcggcatcgacctgggcaccacttactcgtgcgtgggggtattccaacatggcaaggtggagatcatcgccaacgaccagggtaaccgcaccacccccagctacgtggccttcactgacaccgagcgtctcatcggcgacgccgccaagaaccaagtggccatgaaccccacaaacaccatcttcgacgccaagcggctgatcggacggaagttcgaggacgccacagtgcagtccgatatgaagcactggccgttccgagtggtgagcgaaggtgggaagcccaaagtgcaggtggaatataaaggggagatgaagaccttcttccctgaggagatttcttccatggtcctcactaagatgaaggagatcgccgaagcctacctggggggcaaggtgcagagcgcagtcatcactgttcctgcctatttcaacgactcgcagcgccaggccaccaaggatgcgggcaccatcaccggcctcaacgtgttgcgcatcatcaatgagcccacagcagcggccatcgcctacggcctggataagaagggctgtgcgggcggcgagaagaacgtgctcatctttgacctgggcgggggcaccttcgatgtgtccatcctgaccatcgaggatggcatctttgaggtgaagtccacggccggcgatacccacctgggtggcgaagacttcgacaaccgtatggtcagccacctggcggaggagttcaagcgcaaacacaagaaggacattgggcccaacaagcgcgctgtgcgccggctgcgcaccgcctgcgagcgcgctaagcgcaccctgagctcgtccacgcaggccagcatagagatcgactcgctctacgagggcgtggatttctacacgtccatcacccgcgcccgcttcgaggagctcaacgccgatctcttccgagggaccctggagccggtggaaaaggcgctgcgcgatgccaagctagacaagggccagatccaggagatagtgctggtgggcggctcaacccgcatccctaagatccagaagctcctgcaagatttcttcaacggcaaggagctgaacaagagcattaatcccgacgaggcggtggcctacggcgccgctgtgcaggcggctatcctcatcggcgacaagtcggaaaatgtgcaggatctgctgttactcgacgtgactccattgtcgctcggcatcgaaacagctggcggtgtcatgaccccactcatcaagagaaacaccacgatccccaccaagcagacgcagaccttcactacctactcagacaaccagagcagcgtgctggtgcaagtgtacgagggcgaacgggccatgaccaaggacaataacctcttgggcaagttcgacctgactgggatccccccagcaccccgtggggtcccccagatcgaggtcacctttgacatcgatgccaacggcatccttaacgtcactgctgccgacaagagcaccggtaaagaaaataaaatcaccataaccaacgacaagggtcggctgagcaaagacgacattgaccggatggtgcaggaggcggagcggtacaaatcggaagatgaagcaaatcgcgatcgcgtggcagccaaaaatgcggtggagtcctatacctacaacatcaagcagaccgtggaagacgagaaactgaggggcaagattagcgagcaggacaaaaacaagatcctcgacaagtgtcaggaggtgatcaactggcttgaccgaaaccagatggcagagaaagatgagtacgaacacaagcagaaagagcttgagagagtgtgcaaccccatcatcagcaaactttaccaaggcggtccaggcggcggcggctcctctggagggcccaccatcgaggaagtggactaggcttgcgctggagtccgcgtaaacctcttttcctttcttttcttttttctttttttttttttttccttttctcccttttgttttggtttcttttaaatgtccttgtgccaagtaagatctattattggaagtctttagcctggtgcatacatatgaaaggaaaggtgcaacaacttagtttagttataaaaggttagttctaaaagtttgatttgggggaaaaatgaggtttctctttaatgcatttagagcgattgctgatttaagctctttttgttgttgttaagcttacgtatgtacatggagatttgcttgaaagtagaaccctgatgctcgcacacctgacctgtggaagcttggttacactaagacacaggaaagcttgaattgtttatttttatgtactatgagatgaaagtaagcactgcagtgatattaaagacaggtatattctgtaaacacataaatgcacatttaaagtaaagctgaaattgatctcaaaaaaaaaaaaaaaaaaaaaaaaaaaaaa

SEQ ID NO: 368 - DNA, 2033 bp, Mus musculus
atccggcttctctctgccgcctgtgcgccccgtgacgccgacagagccttgggtttaggttgcccgccgcgcttctcacttctgccgcgggtggaacagccccggaggcttccatcctcttcctgaggtgtcggggctcggccccccgcctccatcttcgcgtctcaggatggcgagcagcagcggctccaaggccgaatttatcgtcggtggaaaatacaaactggtgcggaagatcggatctggctctttcggggacatttatctagcgatcaacatcaccaatggcgaggaagtggcagtgaaactagaatcccagaaggccaggcatccccagttgctgtacgagagcaaactgtataagattcttcaaggtggggttggcatccctcacatacggtggtatgggcaagaaaaagactataatgtactagtcatggatctcctgggacccagccttgaagacctcttcaacttctgttcaaggaggttcactatgaagaccgtacttatgttagctgaccagatgatcagtagaattgaatatgtgcatacaaagaattttatacacagagacattaaaccagataacttcctaatgggtattgggcgtcactgtaataagttattccttattgattttggtttggccaaaaagtacagagacaacaggacaaggcaacacataccatacagagaagataaaaacctcactggcactgcccgatacgccagcatcaatgcacatcttggtattgagcagagtcgccgagatgacatggaatctttaggatatgttttgatgtattttaatagaaccagtctgccgtggcaaggactgaaggctgcaacaaagaaacaaaaatatgaaaagattagtgaaaagaagatgtccactcctgttgaggtgttgtgtaaggggtttcctgcagaatttgccatgtacttaaattactgtcgtgggctgcgctttgaggaagctccggattacatgtatctgaggcagctattccgcatccttttcaggaccctgaaccaccaatatgactacacatttgattggacgatgttaaagcagaaagcagcccagcaggcagcctcttccagtgggcagggtcagcaggcccaaacccccacaggtttctaagcatgaattgtggaagagaagcagcagagcagacgattggagcagcgtttgtttctccccaaacctagacattttagttcatatgtacactagccagtggttgtggacaaccatttacttggtgtaaagaacttcatttcggtataaactggctctgggtagcactgcggatcctgagctgtagccactgtccttgtgaatattaactgaggtagtgaaacatggtgtccggttttctattgcattttttttcaagtggaaaagttaactaaatggttgacacacaaattggtggagaaattgtgcatatgccaatttttattttatttttttgttaaaatcttttattttgaactatactgctttgagatctcatttcagaagaacggcatgaacagtcttcagccacagttgtgatggttgtaaatgttcacaattgtgtgttcttagggttttccatccctggggtttgcaagttgttaacttaaaacattcttaaaatggctggcttcttgtttgcaagccagctgatatggtagcaaccaaagattccagtgtttgagcatttgaaagactctgcctgcttacctgtgctagaaataacagcatctaaagtgaagacttaagaaaaaaaacatagcgactactagattctctttaggactctgcattaactctataatgttcttgctattaaaaaaagcatatttgtcacggaaatttagttaccgtcttacaactgaacatgtatgtgtgttgcttagataaatgtaatcactgtaaacatctatacgatctgggattttgtttttattttgaaatgggagctttttgtttacaagttcattaaaaactaaaaactgttaaaaaaaaaaaaaaaaaaaaa

SEQ ID NO: 369 - DNA, 2468 bp, Mus musculus
gagaacctagcaacagcgcaggctcgggggccgagtccgttatggccgcctccgccctgggcagaatgtgcggggctgcacgagagaagctgtctcccgggccgggcgcccggggcctcggggctctggcgcgatctctggtgctggcgttgctgctcgtgcccgtcctgtgctctgatagatcagagaatcctccaaacaatgctaccgtttcttctccagttgtggtgactgcgcctggaaaccacaccagcccttctgtttcccagatcagcaccacacttagcccagccagtgcagagaaaagtgggagcagctctgcggcgcccacccccactgctgctccgtctgcgcccgaggaggaggctgacagcaatgaggaccccagcatggaggaggaggacctcctggctctcaacagctccccggccacaggcaaggacaccctggacaatggcgactacggagagccggactacgactggaccaccaaccctagagatgaggagcctgaagacatcaacattgccatcagcaaggagagcaggcgcttcaggggcttccaggactcagtggaggtcgtgaagctcccgccccccaacagggaggatagccatttcttttttcatctccttatttttgctttctgtgcagctgttgtgtatgttacctatcacaacaaaaggaagattttcctcctagttcaaagcagaaagtggcgtgatggcttgtgttccaaaactgtggagtaccatcgtttggaccagaacgtgaacgaggccatgccttctctgaagatcaccaatgattacattttctaaagcacttgactggcatttgcttagtatgctgttttatttgcttaacttttctatgatgtgcacatgtttgccacagggcaagaggtacttagccgagaaggggcactctattttgccttggtgctttgaaaattaactgtcacaaacaaggagtatatggcttcttttttctttctttttaaaaaatctttctttagagctagattcaatcaggtgtctgaaatgtgagttaaacattactttatcctttggtgtagttcttattattttccatttattgtgcctctggcagcagtgttccctttgaaaggcccatcccagagctcaggccctgcggggtcagcgctgctggttcttatcacttgctgccccccagatgctgtttccggtcctttattctacgtctctagttgagatagggccccactcagtagtccgggctggcctcaaaccgccggtcttactgcctcagcttctcaagtgctggtaccacaggtgtggcagtgcacccacttccaaatctcatattttcaaacacattttttttgtgtgtatggtccccaattttaatgtacaaagatattgcaatacaatgctttgctttaaaataacatttcccccctctctttcaaagctgctttaaggacagtgaagtgggttcaattagtgaaggcacttgctgcctaccctgacagcctgagttcagcccccagggcctccgtggtagaaggcaataatcttagaggttgtcctctgacctccacatgtggaccatggcatctgtgcacctatgcacatgcttacacacatggtaaataaatgtagttaaaaagaacccacttggggtgttttaggcacttgacacacacagtgtaagatgatgtagttgctgcttcatggtcacggtaaacttgtgtagggattctggcaaaagagactgcagttcccagtgagcacaggtgaaatgttaggtagattccaggtttggtttggattactgaatgacgagtagggtagaagctggtagagtatttaacccatgaccagggactgtgtgtcagcacttgattttagcatgagctccaaggttcagacgacaagcagagtgtaagacaggtcagaggtttctcagtttgtttcttgatcacagtaagttggaggagactctagagcccattgtcacttgcgtgagactgtgtcttggtcctgcagttaaagcagtaattggggaaagttcacacagacctgtttaacagtgaccttcattcagacttgcctccctccagcccccagccactgggattatttgccgtatttcatggtagcctgccttttcagagttgatcagaatgtaaatgtgtgatttgaatcatgcttggctaccaagcttctttacaactttgcagaaagcatcgtctttactgcgagctcagtaaagcctgggcgggtaggcgggccggcagccacgctccctgtggacacggaagcagcagcgttgacttcccccgtcagggacagttgactgtccgagggaagggcactgtggtgaaataaacctgaactgttttattgcagtagtttttttcatatctgaaattgtattatttaatattttgaataagattttaagaaataaatggtaaaggt

SEQ ID NO: 370 - DNA, 3153 bp, Mus musculus
  modified_base (3043)..(3043): a, c, g, t, unknown, or other
  modified_base (3048)..(3048): a, c, g, t, unknown, or other
gaggctcccggcgagctggcgcccctgtctgggtcccgcgcgcccggccctgctcgcgcccgcgcatcgcgccgcagtctcggtctgcggctgcgggacgtgacggcgtgcgcggaggggacctcgcaagttcttccatcagtgtgcagaatgataccactgcttctgtccctgctggccgctctggtcctgacccaagcccctgccgccctcgctgatgacctgaaagaagacagctcggaggatcgagccttccgcgtgcgcatcggtgccgcgcagctgcggggcgtgctgggcggtgccctggccatcccatgccacgtccaccacctgcggccgccgcgcagccgccgggccgcgccgggttttccccgggtcaagtggaccttcctgtccggggaccgggaggtagaggttctggtggctcgcgggctgcgcgtcaaggtaaacgaagcctaccggttccgcgtggcgctgcctgcctaccccgcatcgctcacggatgtgtctctagtattgagcgaactgcggcccaatgattccggggtctatcgctgcgaggtccagcacggtatcgacgacagcagtgatgctgtggaggtcaaggtcaaaggggtcgtcttcctctacagagagggctctgcgcgctatgctttctccttcgctggagcccaggaagcctgcgctcgcataggagcccgaatcgccaccccggagcagctctatgctgcctacctcggcggctatgagcagtgtgatgcaggctggctgtccgaccaaactgtgaggtaccccatccagaacccacgagaggcctgctctggagacatggatggctatcctggcgtgcggaactacggagtggtgggtcctgatgatctctatgatgtctactgttatgccgaagacctaaatggagaactgttcctaggcgcccctcccagcaagctgacatgggaggaggctcgggactactgtctggaacgtggtgcacagatcgctagcacaggccagctgtacgcagcctggaatggtggcctggacagatgtagccctggctggctggctgatggcagcgtgcgctatcccatcatcacacccagccaacgctgtgggggcggcctgccaggagtcaagaccctcttcctctttcccaaccagactggcttccccagcaagcagaaccgcttcaatgtctactgcttccgagactctgcccatccctctgcttcctctgaggcctctagcccagcctcagatggacttgaggccattgtcacagtgacagaaaagctggaggaactgcagctgcctcaggaagcgatggagagcgagtctcgtggggccatctactccatccccatctcagaagatgggggaggaggaagctccaccccagaagacccagcagaggcccccaggactccgctagaatcggaaacccaatccattgcaccacctaccgagtcctcagaagaggaaggcgtagccctggaggaagaagaaagattcaaagacttggaggctctggaggaagagaaggagcaggaggacctgtgggtgtggcccagagagctcagcagccctctccctactggctcagaaacagagcattcactctcccaggtgtccccaccagcccaggcagttctacagctggatgcgtcaccttctcctgggcctccaaggttccgtggaccgcctgcagagactttgctccccccgagggagtggagcgccacatctactcctggtggggcaagagaagtagggggggaaactgggagccctgagctctctggggttcctcgagagagcgaggaggcagggagctccagcttggaggatggcccttccctacttccagctacatgggcccctgtgggtcccagggagctggagaccccctcagaagagaagtctggaagaactgtcctggcaggcacctcagtgcaggcccagccagtgctgcccaccgacagtgccagccacggtggagtggctgtggctccctcatcaggtgactgtatccccagcccctgccacaatggtgggacatgcttggaggagaaggagggtttccgctgcctatgtttgccaggctatgggggggacctgtgcgatgttggccttcatttctgcagccctggctgggaggccttccagggagcctgctacaagcacttttccacacgaaggagttgggaggaggcagaaagtcagtgccgagcgctaggtgctcatctgaccagcatctgcacccctgaggagcaagactttgtcaatgatcgataccgggagtaccagtggattgggctcaatgacaggaccatcgagggtgacttcttgtggtcagatggtgcccctctgctctatgaaaactggaaccctgggcagcctgacagctacttcctgtctggggagaactgtgtggtcatggtgtggcatgaccagggacagtggagtgatgtgccctgcaactaccatctatcctacacctgcaagatggggcttgtgtcctgtgggcctccaccacagctacccctggctcaaatatttggtcgccctcggctgcgctacgcggtggatactgtgcttcgatatcgatgccgagacgggctggctcagcgcaacctgccgttgatccgctgccaggagaatgggctttgggaggcccctcagatttcctgtgtaccccggaggcctggccgtgctctgcgctccatggacgccccagaaggaccacggggacagctctcgaggcacaggaaggcaccgttgacaccgccctccagtctctagggagcctggaagactgctgcccccagcaggaccctctcacatcaactgccagtgctcttccccatgatagggggtgacgtgagaggggtgggactgaaattcagaggacagcgctcgaaggggtttctgggaaacacttgggtggctccgccccctcacacaagggcctcaggttttacccggtaagtccctaagtgcctcaactgccctctcatgtcagctgcctccttgtccctcgatntcgtnaggggacactgtgctattcgatcttgattgtcgaagagtttttaggatggagtaccagcaaaaccaggtggaaataaagttgtctgaacccaaagaaaaaaaaaa

SEQ ID NO: 371 - DNA, 1703 bp, Mus musculus
gaggaacaaaaggagatgtgggaactggggccctaactctgttagctgtcaaagagattgataccactttgatgcccaggctccaggccaaaggctgctctcctgctcccagccccgtgctgggaagcctgtttggttaggagaggaagtagaaggtcctcggagtctagagcttatgtcttctccattctagacaactgtcatcatgccccactcatacccagctctttctgctgagcagaagaaggagttgtcggatattgctctacggatcgtgacccccggcaagggcattctggctgcagatgagtccgtaggcagcatggccaaaaggctgagccaaattggggtggagaacactgaggagaatcgccggctgtaccgccaggtcctattcagtgctgatgaccgtgtgaaaaagtgcattgggggggtcatcttcttccatgagacactctaccagaaagatgacaatggtgtccccttcgtccgcaccatccaggataagggcattctcgtaggcatcaaggttgacaagggtgtagtgcctctagctgggaccgacggggaaaccaccactcaagggctggatgggctcttggaacgctgtgctcagtataagaaggacggtgctgattttgccaaatggcgctgtgtactaaaaatcagtgatcgcacgccgtcggcactggccatattggagaatgccaacgtgctggcccgctatgccagcatctgccagcagaatgggatcgtgcctattgtggagcctgagattctgcctgacggagaccatgacctcaaacgttgccagtatgttacagagaaggtcctggctgctgtatacaaggccctgagtgaccatcatgtatacctcgaagggactctgctcaagcccaatatggtgacccctggccatgcctgtcccatcaagtatagcccagaagagatcgccatggcaactgtcactgccctgcgtcgtactgtgcccccagctgtcccaggggtgactttcctgtctgggggtcagagtgaagaggaggcttctctcaacctcaatgccatcaaccgctgcccacttccccggccctgggccctcaccttctcctatgggcgtgccctgcaggcatctgcactcaatgcctggagaggacaaagggataatgctggggctgctactgaggagtttatcaagcgggcagagatgaacgggcttgcagcccagggcagatatgaaggcagtggagatggcggagcggcagcacagtccctctacatcgccaaccatgcctactgaggcacgctgactctacccacagcccttggcctagcaatgcacatcccattttgcctatagtcacagccagggccaaatagctatgcagaacagagatatctttatccagcgccaagtcatctcacatctcacatgccttacattgctgtacccgagaccacaggatgggagggtagagatgccctcccatgtttgaagatggggggactttctagaagtcagaacagaacatgtggacctttttcctgtctccaccagcccttacagttacccttgatggtatagtttgtccttgggctctgcttgctaattttctctcttgggatcagggggacgtgaactccagccctgactcgtgctccttatgctctgagtacatagcaaataaatgagagcaaaacccagc

SEQ ID NO: 372 - DNA, 1770 bp, Mus musculus
aaaacggcgcgcactccggcgcagccagtcaccgcttccctgagagctgtcgcccgtgcgcctcccagcagctgccagaatgccaaactggggaggaggcaagaaatgtggggtatgccagaagacggtctactttgctgaggaggtccagtgcgagggcaacagcttccataaatcctgcttcctgtgtatggtctgcaagaagaatctggacagcaccaccgtggcagtgcatggagaagagatctattgcaagtcatgttacggcaagaagtatgggccaaaaggctacggctacgggcagggcgcaggcacgctgagcacagacaagggggagtctctgggcatcaagcatgaggaagcccctggacacaggcccaccaccaaccccaatgcatccaagtttgcccagaagattggcggctctgagcgctgtccccgctgtagccaggcggtctatgctgcggagaaggtgatcggtgccgggaagtcctggcataagtcctgcttccgatgtgccaagtgtggcaaaggccttgagtcgaccaccctggcagacaaggatggtgagatctactgtaaaggatgctatgccaaaaactttgggcccaaaggttttggctttggacagggagctggagccttggttcactcagagtgaggctgccaccgcctgcgcaccctgcttactcctaagcttttcatcagcggtccattcccaagccttggacacctccgagctcctctccctcactcagccccgctgcacatcactaatgccttggacttgggtatctggctttttgtggctcagggatctgcctgagctccttccccacgaagggtttcctcctgcctggcatttgataccattacctttaggagacatctgtctagtcgcccctttccagagaccaggtccctttccccacaccttaccctcctctgtttctaggctgaatgtccactctctactggccaggacacctgagcccacatctttggagaccaatagagcaaagcaggagacctggggcagggaggcaggaccagaattggcctagggagggttatggtttttgggtcccagagagtctcctctgagtaggcggctgagttcttggtgtatctcagtctgggaagtctccatgagaggcagggaggtgcagataggattgtgggccatcggaaggagctctttctctggcccttgcctttgaatgtggaaatagtatcttttcacttaggaatggagaacaagccagttcagaggaccccaaagtctagagattgcctgacctccttaggcatcaagttcccagtttgatgggcaagggagatcctaatgaataccttgaccaagtatttgcatttatcagtggtccagatcttggagtggccaattctagttctaaccttgggccaggtggctgaaatagacagtttctgttacagcatagcccagggtagagctgtgttctagccactcctgagggttcctttgaaccccaagtcctcactcccctccaacccagactcagacccttctttcttcaccctacctttctctagtaaccttcactaccttgcccaccccatccaggccccaaggtcaggagcgggggggggggggcgagggaggggaagggccgggccttgatgctccccggaactgaggggacaaggctgtacagctgtttgctgcaagggctgtaggcatgggctgttgaagctgatttatcatctgatcaataaagcaatttagaactc

SEQ ID NO: 373 - DNA, 749 bp, Mus musculus
ggcatttgggtaaaagtcgcacggagtagcagcgtctgttctgcaccaactcagagtcttgttggagctttatccctttgtcctagccaaccatggccagcccgctgcgctccttgctgttcctgctggccgtcctggccgtggcctgggcggcgaccccaaaacaaggcccgcgaatgttgggagccccggaggaggcagatgccaatgaggaaggcgtgcggcgagcgttggacttcgctgtgagcgagtacaacaagggcagcaacgatgcgtaccacagccgcgccatacaggtggtgagagctcgtaagcagctcgtggctggagtgaactattttttggatgtggagatgggccgaactacatgtaccaagtcccagacaaatttgactgactgtcctttccatgaccagccccatctgatgaggaaggcactctgctccttccagatctacagcgtgccctggaaaggcacacactccctgacaaaattcagctgcaaaaatgcctaagggctgagtctagaaggatcatgcagactgttccttacttgtgctccttccctatagtgtttcatctcgcagaagggtgctccggctctggagggcaccgccagtgtgtttgcaccaggagacagtaaaggagctgctgcaggcaggttctgcacatctgaacagctgtcccctggctccactcttcttgcagtacctgccatgccttgctcaattaaaaaaaaaaaaaattcg

SEQ ID NO: 374 - DNA, 2797 bp, Mus musculus
ccatcctaatacgactcactatagggctcgagcggccgcccgggcaggtctttgctgcaaagctcagcagcacagagggagcgagatccaggaatgtgcaacagaaaccatgacagcctgaaacaccctgtggtgccaacctccaaattctcatctgtcacttcagaccctgactggctgacagagcagcagaatttcaactccaataaacgtgaatgtgcttttaggcaaagcaaccaagctgacgagggaggggggtggaagagctagctcctcttgggcatttgtcaaacttttacctcctggctgtgtgcaaggaggggactcaacttcggcttcaagctaccaaggctctggatccagccacctctccgcagatctagccagcatgaaggctgtgcttctcctcctgtgcgccttgggaaccgctgtggcaatcccgacaagtacaaggtttctctttgaccactccaacccaactactgcaacactggtgacaccggaagacgctacagtccccattgccggggttgaagctacagcagacatagaaaaccatcccaatgacaaggctgaaaaaccttcagcacttaattcagaagaggaaactcatgaacagtcaacagagcaggacaaaacctacagcttcgaggtggacctgaaggatgaggaggatggagatggggatttaagtgtagatccaacggaaggaacactaacactggatctacaagaaggcacaagtgagcctcaacagaaaagtctcccggagaacggcgatttccccgcgaccgtgtccacttcctatgtggatcctaaccaacgcgcaaacatcacaaagggaaaggagagtcaggagcaacctgtaagtgactcacaccagcaaccgaatgaaagcagcaagcaaacccaagacttaaaggctgaagaaagccagacacaagatccagacattcccaatgaagaagaggaagaagaagaggacgaagaagaggaagaagaggaagagccggaagacattggtgcccccagtgataaccaagaggagggaaaagaacctctggaggagcagcctaccagcaagtgggaaggaaacagagagcaatctgatgacaccttagaagagtccagtcagcccactcagataagcaagacagagaagcatcaatctgagcaaggaaaccaagggcaggagagtgactctgaggcagaaggagaggacaaggctgcaggcagcaaggaacacattccacatacagagcagcaggaccaagaagggaaagctggccttgaagctattggcaaccagaaggacactgatgagaaggccgtttccacagaacctaccgatgctgccgtggtgcctaggagtcacggaggagctggtgataacgggggcggggatgactctaagcatggtgcaggcgatgactacttcatccccagccaggaattcctagaggccgaaaggatgcattccctctcctattacctcaaatatggcggcggcgaggagacaacgactggcgagagtgagaaccggagggaggctgcagacaaccaagaggccaagaaagctgagagctcaccaaatgctgaaccttcagatgagggcaactcaagggagcacagtgctggttcttgcacgaacttccaatgtaaaaggggacacatttgcaaaaccgatccacaagggaaacctcactgtgtttgccaagatccagagacttgtccccctgcaaaaatcctagatcaggcttgtggcactgacaaccaaacctacgccagctcctgtcacctgtttgctaccaagtgcaggctggaggggaccaaaaagggacaccaactgcagctggattacttcggagcttgcaaatctattcctgcttgtacggactttgaagtggctcagtttcccctgcggatgagagactggctcaaaaacatcctcatgcagctttatgaaccaaatcccaaacatggcggctatctcaatgaaaagcaaagaagcaaagtcaaaaaaatttacctggatgagaagagactcttggctggagaccatcccattgaacttctcttgagggactttaagaaaaactaccacatgtatgtgtatcctgtgcactggcagtttaatgaactggaccagcatcctgcagacaggatcttgacacactctgaacttgctcctctgcgagcttccctggtgcccatggaacactgcataactcgcttctttgaggagtgtgaccccaacaaggataagcacatcaccttgaaggaatggggccactgctttggaattaaagaggaggatatagatgaaaacctcctcttttgaattaagatttgagagaatcggaactttccatccacctcacctgctttacccgcttcagaaatacgagcagccatgacactatacattcatatgtagcaaaacatgtgtgtgcatgtgagagaagacaatggtagtaattacttctgggtgatatatatatgagccaggcacttaatattaacttaggaaatgaaactttaaaattaagtagagtcaatgtctataaaagactgtcctgtctggggacagttagccaccatggcaatgtcactctgtgcatctgcgtttataattgataattataaactattaaaaaaacaatgttcatattgtccataataccttatgcatgctgaggaagtgagatactgctcttttgagataaatatgcctccttttcagtgtcttgatgtcctaataaaaaatctataaaacctccccaaaaaaaaaaaaaaa

SEQ ID NO: 375 - DNA, 933 bp, Mus musculus
gcgtctctgctgcttttgtgctctccctcccgccatggccagccttaaggatctcgaagggaagtggcgcctgatggaaagccacggctttgaggagtacatgaaagagctaggagtaggactggctcttaggaagatggctgccatggccaagccagactgtatcattacgtgtgatggcaacaacatcacggtcaaaaccgagagcacagtgaagacgactgtgttctcttgtaacctgggagagaagtttgatgaaacgacagctgatggcagaaaaactgagacggtctgcaccttccaagacggtgccctggtccagcaccagcaatgggacgggaaggagagcacgataacaagaaaactgaaggatgggaagatgatcgtggagtgtgtcatgaacaatgccacctgcactcgggtctatgagaaggtgcaatgagggcttcctcgtcatcctggacaggagttagctgccagagtgaatatgctcaattcagtgagcggtcaaatgcaacaaacagcttcacttctttggttttatttttcatgactgttgagttctctttatcacaaacactttacatggaccttcatgtcaaacttggtttacccaggatcattcctttggttagtaaataaacgtgttagtgctaatttatgatatgtgtgtgggttcttcaaggaattgaaaattggtgatacattataacacttagaaattgaaaagtctctggtattcttaggggatcccttatgactggatatatcctagcaacttgtagacgtggccagcttcttttgcagtgaatacatgccccgtcatttaagcttgccttaaatcgtttgaactttgtcaactcaataattgagactattcctatcgaatgatagctacataaattttatagaataaagggagatccaagctta

SEQ ID NO: 376 - DNA, 1051 bp, Mus musculus
agcaaccatgcaagtgctaacgaaacgctatcccaagaactgcctgctgacagtcatggatcggtactccgcggtggtgcggaacatggagcaggtggtgatgatccccagccttctgagggatgtgcagctgagtgggcctgggggctcggtccaggacggagcccctgatctctatacctacttcaccatgctcaagagcatctgtgtagaagtggaccacgggctgctgccaagggaggaatggcaggccaaggtggctggcaacgaaaccagcgaggctgagaacgacgctgctgaaacggaggaggccgaagaagacaggatctcggaggagctggacctagaagcccagttccacctgcacttctgcagcctccatcacatccttacccacctgacccggaaagcacaggaggtgacgcggaaataccaggaaatgacagggcaggtcctgtaggtctttgactcttctgaagatcgctttacacgagagaagactgatgaagaccccgaggtgcatcaacccgagacctggacagagggcctggccccaggtggacgcgaaggcggcttccgtctccctctgagtgcatctgtggacttggttgcaggctcacctttaagatatttgtgtgactcccaacttctcttccgtatcttagcagtttgaggttcacgaggcagcaaggatcagtaggaagcacaggtattaacaagttggccaaagttcacgtcccacctctgggatgtcgtttagtgcctggtgtcatgtcgcagttactctttcatgtataaagcagggatgctgtatctacctcacacggttactaaaagcaaacacggaatccaaagccctgggcacatgccgacatctgaaaagctggtgtttctcccacctccctccgagtgcatgctgtacgcagctcttgcttttatccctggggaaaggctgaggtcactgagtgtgtgggatgagctgctcaggctgctgggcctgatgcgctgagcacatgaacctaactattgtagtagcaaaaaaaaaaaaaaa

SEQ ID NO: 377 - DNA, 2010 bp, Mus musculus
ggtggcagcgaccgcggcggctgcagcaggccaccatggcagaacttcaggaggtgcagatcaccgaggagaagccgctgttgccaggacaaacacccgagactgccaaggaggccgagttagctgcccgcatcctcctggaccagggacagactcactctgtggagacaccttatggctcggtcacttttactgtgtatggcacccccaaacccaaacgcccggcaatattcacctaccatgatgtaggcctcaactataagtcttgcttccagccactgtttcggttcggggatatgcaagagatcatacagaacttcgtgcgggttcatgtggatgcccctggcatggaagagggggcgcctgtgtttcctctgggatatcagtacccatctctggaccagcttgctgacatgattccttgcatcctgcagtacctaaatttctctacaataattggagttggtgttggagccggagcctacattctgtcgcgatatgctctgaaccacccggacacagttgaaggtcttgttctcatcaacattgatcccaatgccaagggctggatggactgggcagcccacaagttaactggccttacgtcttccattccggacatgattcttggacatcttttcagccaggaagagctttctggaaattctgaattgatacaaaagtacagaggtatcatccaacacgcacccaacctggagaacattgaactctactggaacagctacaacaaccgccgagacctgaactttgagcgaggtggtgagacgaccctcaagtgccctgtgatgctggtggttggagaccaagcacctcatgaagatgccgtggtggaatgtaactcaaagctggaccccacacagacctcgttcctcaagatggccgactctggaggtcagccacagctgactcagcccggcaagctgacagaggctttcaagtacttcctgcaaggcatgggctacatggcctcttcctgcatgactcgcctatctcggtctcgcacagcatctctgaccagtgcagcatccatcgatggcagtcggtcccgatcccgcaccctgtcgcagagtagcgagtctgggactctcccttctggacccccagggcacaccatggaagtctcctgttgaatgaccctcattgccttggtgtggatcccagccctcacctcctgcaacactaacttaagaggtgttatcagggcactgggccagagtaagcaaggaaaatgggcagattgtgcagggagatgaccttgatctttaattgctaccctaaccttgacctttaacctgtgatatcctctagctcctaggtgaggtgtcctaatatctcttagagatctgggccccctaaattaccccctcttccattttggtgttgagaaggcttgtatgttctctctctgacctaggttctatagatgaggaacaatgagctgttctagctgacacggggcctccatcactccccctctttagcccatatttgcaagggtaggagagagagtgtgtgtgtgttgtgtgtggtgttgtgtgtgtgtagggttgatggtgagagatggggagctccttccccaaagctgacagtggctttgccttgatgtgtcaggcctctctgaaggcaatagtcccaaatgaatgtttatcaggagaaggtttgctggtgggtcagcgatccttaatgtgatagaaatatccagcatgtaaaaagaaaggatgggagatggtggcccgtgaagaacagtggtaaacacattgaagctggggtagaagggagggacccaggtcctttggccgcactaacttggatagctgtcagcgtgcacctaaagtgggactaagggaaagagcttaggtctgactgcttggggcttggcatcagggtgggaagagctacctcaggctctgaccatactgtgacgtgtagagcgtgacctcctgtctcacacaacttctgctgtgacaataaactatagaggaaactgaa

SEQ ID NO: 378 - DNA, 2593 bp, Mus musculus
gcagcctgggtcctcaccgtcgccatggctccgtaccgctcttcactgctctgcgcgctgctcctcctggcgctgtgcgcactgtcgccttcccatgcagccaccacatcacggggcagggcccaagagagggcgccccaaagtcgggtgtctgaggcgcggcccagcactatggtggtggagcaccccgaattcctgaaggcagggaaggagcctggcctgcagatctggcgtgtggagaagtttgacctggtgcctgtgccccccaacctctatggagacttcttcacgggtgatgcctatgtcatcctaaagactgtgcagctgaggaatgggaatctgcagtatgacctccactattggctgggcaatgaatgcagccaggatgagagcggggctgctgccatctttactgtgcaactggatgactacctgaacggccgggctgtacagcaccgtgaggttcagggctttgagtcgtccaccttctccggctacttcaagtctggacttaagtacaagaaaggaggtgtggcatctggattcaaacacgtggtacccaatgaggtggtggtccagaggctcttccaggtcaaaggacgccgtgtagtccgtgctactgaggtacctgtgtcctgggacagtttcaacaatggcgactgcttcattctggacctgggaaacaatatctatcagtggtgtggctctggcagcaacaaatttgaaaggctgaaggccacacaggtgtccaagggcatccgggacaacgagaggagtggccgtgctcaagtacacgtgtctgaagagggaggagagccagaagccatgctgcaggtgctgggccccaagccagctctgcctgaaggtaccgaggacacagccaaggaagatgcagccaaccgaaggctggccaagctctacaaggtctccaatggtgcaggtagcatgtcagtctccctagtggctgatgagaaccccttcgcccagggcgccctgagatctgaggactgcttcatcctggaccatggcagagatgggaaaatctttgtttggaaaggcaagcaggccaacatggaggagcggaaggctgccctcaaaacagcctctgacttcatctccaagatgcagtaccccaggcagacccaggtttcagttctcccagagggcggtgagacccctctctttaagcagttcttcaagaactggcgggacccagaccagacagacggccccggcctgggctacctctccagccacattgccaacgtggagcgcgtacctttcgatgctgctacgctgcacacctccaccgccatggccgctcagcacggcatggatgatgatggaactggccagaaacagatctggagaattgaaggttccaacaaggtgccagtggaccctgccacatacgggcagttctatggaggcgacagctacatcattctgtacaactaccgccacggtggccgccagggacagatcatctacaactggcagggtgcccagtctacccaggatgaggttgctgcttctgccatcctgactgcccagctggatgaggagctgggaggaactcctgtccagagccgagtggtccaaggcaaagagcctgcacacctcatgagcttgtttggcgggaagcccatgatcatctacaagggtggcacctcccgtgatggtgggcagacagctcctgccagtatccgcctcttccaagtgcgagccagcagctctggagccaccagggctgtggaggtgatgcctaagtctggtgctctgaactccaacgatgcctttgtgctgaaaaccccctccgctgcctacctgtgggtgggcgcaggagccagtgaggcggagaagaccggcgcccaggagcttctgaaggtgcttcggtcccagcatgtgcaggtggaagaaggcagtgagccagatgccttctgggaggctctgggcgggaagactgcctaccgcacatcccccaggcttaaggacaagaagatggatgcccatcctcctcgactctttgcctgctccaacaggatcggacgctttgtgatcgaagaggttcctggcgagcttatgcaggaagacctggctactgatgacgtcatgctcctggacacctgggaccaggtctttgtctgggttggaaaagactcccaggaagaggaaaagacggaagccttgacttctgctaagcggtacatcgagacagatccagcaaatcgggacaggcggacccccatcacagtcgttaggcagggctttgagcctccttccttcgtgggctggttcctcggctgggatgacaactactggtcggtggatcctttggaccgggccttggctgagctggctgcctgagtaaggaccaaagccatcaatgtcaccaatcagtgcctttgagggttgtccatctcccaaagacatcatatggcaagcaggaaaactatgatgtgtgcgcgcgtgtttttgtttttgttttttacggtagccaaaacaagccctgtggaaactcagggtctttacagaattgcttcaaatgtctgtactttggaaatgaaagccaataaaagctttttgaagtgtg

SEQ ID NO: 379 - protein, 270 aa, Mus musculus
MVISVVLLLLAAYAVPAQGLGSFVHCEPCDEKALSMCPPSPLGCELVKEPGCGCCMTCALAEGQSCGVYTERCAQGLRCLPRQDEEKPLHALLHGRGVCLNEKSYGEQTKIRDSREHEEPTTSEMAEETYSPKVFRPKHTRISELKAEAVKKDRRKKLTQSKFVGGAENTAHPRVIPAPEMRQESEQGPCRRHMEASLQEFKASPRMVPRAVYLPNCDRKGFYKRKQCKPSRGRKRGICWCVDKYGMKLPGMEYVDGDFQCHAFDSSNVE

SEQ ID NO: 380 - protein, 662 aa, Mus musculus
MSSRPPASPPAQGSRLLLLSLLLLGTVPGPRPGSAFYLPGLAPVNFCAEEKSNECKADIELFVNRLDSVESVLPYEYTAFDFCQASEGKRPSENLGQVLFGERIEPSPYKFTFNKKETCKLVCTKTYNTEKAEDKQKLDFLKKSMLLNYQHHWIVDNMPVTWCYEVEDSQKFCNPGFPIGCYITDKGHAKDACVISSEFHERDTFYIFNHVDIKIYYHVVETGSMGARLVAAKLEPKSFKHTHIDKPDCSGPAMDISNKASGEIKIAYTYSISFEEEKNIRWASRWDYILESMPHTHIQWFSIMNSLVIVLFLSGMVAMIMLRTLHKDIARYNQMDSTEDAQEEFGWKLVHGDIFRPPRKGMLLSVFLGSGTQILIMTFVTLFFACLGFLSPANRGALMTCAVVLWVLLGTPAGYVAARFYKSFGGEKWKTNVLLTSFLCPGIVFADFFIMNLILWGEGSSAAIPFGTLVAILALWFCISVPLTFIGAYFGFKKNAIEHPVRTNQIPRQIPEQSFYTKPFPGIIMGGILPFGCIFIQLFFILNSIWSHQMYYMFGFLFLVFIILVITCSEATILLCYFHLCAEDYHWQWRSFLTSGFTAVYFLIYAIHYFFSKLQITGTASTILYFGYTMIMVLIFFLFTGTIGFFACFWFVTKIYSVVKVD

SEQ ID NO: 381 - protein, 1986 aa, Mus musculus
MKTPENLEEPSATPNPSRTPTERFVYLEALLEGGAPWGFTLKGGLERGEPLIISKIEEGGKADSVSSGLQAGDEVIHINEVALSSPRREAVSLVKGSYKTLRLVVRRDVCAAPGHADPGTSKSLSSELLTCSPQHRKATWSGGVKLRLKQRCSEPATRPHSWHTTKFGETQPDVSMMQISQGTMGPPWHQSYHSSSSTSDLSNYDHAYLRRSPDQCSSQGSMESLEPSGGYPPCHLLSPAKSTSSIDQLGHLHNKRDSAYSSFSTSSSIFEYPPPGGSARERSGSMDVISARGGLLEGMRQADIRYVKTVYDTRRGVSSEYEVNPSALLLQGRDAHASADSQGCAKWHSIPRGKGTPSPSWSQQCSGSLETATDNLPQKAGAPLPPTRSDSYAAFRHRERPSSWSSLDHKRFCRPQTNSSGSQKTPFAEDQLHTVPERSPENSPPVKSKHNYTQKAQPGQPLLPTGIYPVPSPEPHFAQVPQPSVSSNGTVYPALVKESGYTAAQGTCNKMATLDENGNQNEASRPGFAFCQPLEHNSVTPVEKRPEPTAKYIYKVHFSSVPENEDSSLKRHITPPHGHSPYPSERKNIHGGSRACSNHHSLSSPQAQALHVGDDRKPSRLSQPWEGDFQEDHNANLRQKVEREGQGQGLSGNSGRTRSAFSSLQNIPESLRRQSNVELGEAQEVHPGGRSKVEDPGRKAGASDIRGYLDRSVSYPRPEGKMNAVDSVHSADSRYEESPAPALPQTSGASQRRLSSSSSAAPQYRKPHCSVLEKVSRIEEREQGRHRPLSVGSSAYGPGNRPGRTGPTPSTSSSDLDDPKAGSVHFSESTEHLRNGEQNPPNGEAKQEEASRPQCSHLIRRAPADGRGPPARGGEPSRPEARLLRSQSTFQLYSEAEREASWSEDRPGTPESPLLDAPFSRAYRNSIKDAQSRVLGATSFRRRDLEPGTPATSRPWRPRPASAHVGMRSPEAAVPSSSPHTPRERHSVTPAAPQAARRGPRRRLTVEQKKRSYSEPEKMNEVGVSEEAEPTPCGPPRPAQPRFSESTVADRRRIFERDGKACSTLSLSGPELKQFQQNALADYIQRKTGKRPTGAASHTGGRAARARTERLPPGRPRGARWPRLASACSLSSLREPEALPRKEHTHPSAADGPQAPRDRSSSFASGRLVGERRRWDPQVPRQLLSGANCEPRGVQRMDGAPGGPPSWGMVAGKAGKSKSAEDLLERSDTLAVPVHVRSKSSPTSDKKGQDVLLREGSNFGFVKDPCCLAGPGPRSLSCSDKGQNELALPLHHHTPCWNGSGCKATVASSAPPESSGAADHLKQRRAPGPRPLSAGMHGHFPDARAASLSSPLPSPVPSASPVPSSYRSQLAMDQQTGQQPPSSPASAVTQPTSPRSLELSSPAYGLGEGMWKRTSLPQRPPPPWVKWAHAVREDGLAEDTLAPEFANLKHYRNQPSRPSSCSTSDPDTPGRISLRISESALQPSPPPRGDYDDEVFMKDLHPKVTSSPTFEALPPPPPPSPPSEEPLVNGTDDFPPPPPPQALCEVLLDGEASTEAGSGPCRIPRVMVTREGHVPGAAHSEGSQIMTATPPQTSAKGSEAESNTPSSASAQPQLNGSPGKQLCPSQTRNLTYEPVERTQDLGKKTHAEPQKTSEDIRTEALAKEIVHQDKSLADILDPDSRMKTTMDLMEGLFPGDASVLMDSGAKRKALDITARRAGCEAKASDHKEAVSVLVNCPAYYSVSAAKAELLNKIKDMPEELQEEEGQEDVYEKKAELIGSLTHKLESLQEAKGSLLTDIKLNNALGEEVEALISELCKPNEFDKYKMFIGDLDKVVNLLLSLSGRLARVENVLRGLGEDASKEERSSLNEKRKVLAGQHEDARELKENLDRRERVVLDILANYLSAEQLQDYQHFVKMKSTLLIEQRKLDDKIKLGQEQVRCLLESLPSDFRPKAGAISLPPALTGHATPGGTSVFGGVFPTLTSPL

SEQ ID NO: 382 - protein, 586 aa, Mus musculus
MPKPINVRVTTMDAELEFAIQPNTTGKQLFDQVVKTIGLREVWYFGLPYVDNKGFPTWLKLDKKVSAQEVRKENPVQFKFRAKFYPEDVAEELIQDITQKLFFLQVKDGILSDEIYCPPETAVLLGSYAVQAKFGDYNKEMHKSGYLSSERLIPQRVMDQHKLSRDQWEDRIQVWHAEHRGMLKDSAMLEYLKIAQDLEMYGINYFEIKNKKGTDLWLGVDALGLNIYEKDDKLTPKIGFPWSEIRNISFNDKKFVIKPIDKKAPDFVFYAPRLRINKRILQLCMGNHELYMRRRKPDTIEVQQMKAQAREEKHQKQLERQQLEAEKKRRETVEREKEQMLREKEELMLRLQDYEQKTKRAEKELSEQIEKALQLEEERRRAQEEAERLEADRMAALRAKEELERQAQDQIKSQEQLAAELAEYTAKIALLEEARRRKEDEVEEWQHRAKEAQDDLVKTKEELHLVMTAPPPPPPPVYEPVNYHVQEGLQDEGAEPMGYSAELSSEGILDDRNEEKRITEAEKNERVQRQLLTLSNELSQARDENKRTHNDIIHNENMRQGRDKYKTLRQIRQGNTKQRIDEFEAM

SEQ ID NO: 383 - protein, 465 aa, Mus musculus
MKPLLLLVAVALGLATVVSVVSAGPEAIECWFVEDAGGGGLSKKPATLLLRHGPRGPPPRPDLDPKLYFKVDDPAGMLLAAFRRYPAGASAPHCEMSRFIPFPASAKWARSLSPEQNCPRALDGDWLLVSVSSTLFSLSSLLRPQPEPLREPVVITMATVVLTVLTHNPAPRVQLGKDAVLDLRFAYAPSALEGSPSLDAGPPPFGLEWRRQHRGKGHLLLAATPGLAGRMPPAQEKATAFAAWDDDEPWGPWTGNGTFWLPAVKPSQEGVYLATVHLPYLQGQVSLELTVHKAPRVSLTPAPVVWAAPGEAPPELLCLASHFFPAEGLEVKWELRGGPGGSSRKVEGKTWLSTIRHHSDGSVSQSGHLQLPPVTAKQHGVHYVCRVYHSSLPASGRSADVTLEVAGFSGPSIEDGIGLFLSAFLLLGLLKVLGWLAAYWTIPEVSKEKATAASLTIPRNSKKSQ

SEQ ID NO: 384 - protein, 798 aa, Mus musculus
MNLQLVSWIGLISLICSVFGQTDKNRCLKANAKSCGECIQAGPNCGWCTNTTFLQEGMPTSARCDDLEALKKKGCQPSDIENPRGSQTIKKNKNVTNRSKGMAEKLRPEDITQIQPQQLLLKLRSGEPQKFTLKFKRAEDYPIDLYYLMDLSYSMKDDLENVKSLGTDLMNEMRRITSDFRIGFGSFVEKTVMPYISTTPAKLRNPCTSEQNCTSPFSYKNVLSLTDRGEFFNELVGQQRISGNLDSPEGGFDAIMQVAVCGSLIGWRNVTRLLVFSTDAGFHFAGDGKLGGIVLPNDGQCHLENNVYTMSHYYDYPSIAHLVQKLSENNIQTIFAVTEEFQPVYKELKNLIPKSAVGTLSGNSSNVIQLIIDAYNSLSSEVILENSKLPDGVTINYKSYCKNGVNGTGENGRKCSNISIGDEVQFEISITANKCPNKESETIKIKPLGFTEEVEVVLQFICKCNCQSHGIPASPKCHEGNGTFECGACRCNEGRVGRHCECSTDEVNSEDMDAYCRKENSSEICSNNGECVCGQCVCRKRDNTNEIYSGKFCECDNFNCDRSNGLICGGNGVCRCRVCECYPNYTGSACDCSLDTGPCLASNGQICNGRGICECGACKCTDPKFQGPTCETCQTCLGVCAEHKECVQCRAFNKGEKKDTCAQECSHFNLTKVESREKLPQPVQVDPVTHCKEKDIDDCWFYFTYSVNGNNEAIVHVVETPDCPTGPDIIPIVAGVVAGIVLIGLALLLIWKLLMIIHDRREFAKFEKEKMNAKWDTGENPIYKSAVTTVVNPKYEGK

SEQ ID NO: 385 - protein, 382 aa, Mus musculus
MGDWSALGKLLDKVQAYSTAGGKVWLSVLFIFRILLLGTAVESAWGDEQSAFRCNTQQPGCENVCYDKSFPISHVRFWVLQIIFVSVPTLLYLAHVFYVMRKEEKLNKKEEELKVAQTDGVNVEMHLKQIEIKKFKYGIEEHGKVKMRGGLLRTYIISILFKSVFEVAFLLIQWYIYGFSLSAVYTCKRDPCPHQVDCFLSRPTEKTIFIIFMLVVSLVSLALNIIELFYVFFKGVKDRVKGRSDPYHATTGPLSPSKDCGSPKYAYFNGCSSPTAPLSPMSPPGYKLVTGDRNNSSCRNYNKQASEQNWANYSAEQNRMGQAGSTISNSHAQPFDFPDDSQNAKKVAAGHELQPLAIVDQRPSSRASSRASSRPRPDDLEI

SEQ ID NO: 386 - protein, 319 aa, Mus musculus
MYNMMETELKPPGPQQASGGGGGGGNATAAATGGNQKNSPDRVKRPMNAFMVWSRGQRRKMAQENPKMHNSEISKRLGAEWKLLSETEKRPFIDEAKRLRALHMKEHPDYKYRPRRKTKTLMKKDKYTLPGGLLAPGGNSMASGVGVGAGLGGGLNQRMDSYAHMNGWSNGSYSMMQEQLGYPQHPGLNAHGAAQMQPMHRYVVSALQYNSMTSSQTYMNGSPTYSMSYSQQGTPGMALGSMGSVVKSEASSSPPVVTSSSHSRAPCQAGDLRDMISMYLPGAEVPEPAAPSRLHMAQHYQSGPVPGTAKYGTLPLSHM

SEQ ID NO: 387 - protein, 415 aa, Mus musculus
MCLSPVKGAKLILIFLFLGAVQSNALIVNLTDSKGTCLYAEWEMNFTITYETTNQTNKTITIAVPDKATHDGSSCGDDRNSAKIMIQFGFAVSWAVNFTKEASHYSIHDIVLSYNTSDSTVFPGAVAKGVHTVKNPENFKVPLDVIFKCNSVLTYNLTPVVQKYWGIHLQAFVQNGTVSKNEQVCEEDQTPTTVAPIIHTTAPSTTTTLTPTSTPTPTPTPTPTVGNYSIRNGNTTCLLATMGLQLNITEEKVPFIFNINPATTNFTGSCQPQSAQLRLNNSQIKYLDFIFAVKNEKRFYLKEVNVYMYLANGSAFNISNKNLSFWDAPLGSSYMCNKEQVLSVSRAFQINTFNLKVQPFNVTKGQYSTAQECSLDDDTILIPIIVGAGLSGLIIVIVIAYLIGRRKTYAGYQTL

SEQ ID NO: 388 - protein, 227 aa, Mus musculus
MKMVAPWTRFYSHSCCLCCHVRTGTILLGVWYLIINAVVLLILLSALADPNQYHFSGSELGGEFEFMDDANMCIAIAISLLMILICAMATYGAYKQHAAWIIPFFCYQIFDFALNTLVAITVLVYPNSIQEYIRQLPPSFPYRDDIMSVNPTCLVLIILLFIGILLTLKGYLISCVWSCYRYINGRNSSDVLVYVTSNDTTVLLPPYDDATAVPSTAKEPPPPYVSA

SEQ ID NO: 389 - protein, 339 aa, Mus musculus
MSTVHEILCKLSLEGDHSTPPSAYGSVKPYTNFDAERDALNIETAVKTKGVDEVTIVNILTNRSNVQRQDIAFAYQRRTKKELPSALKSALSGHLETVILGLLKTPAQYDASELKASMKGLGTDEDSLIEIICSRTNQELQEINRVYKEMYKTDLEKDIISDTSGDFRKLMVALAKGRRAEDGSVIDYELIDQDARELYDAGVKRKGTDVPKWISIMTERSVCHLQKVFERYKSYSPYDMLESIKKEVKGDLENAFLNLVQCIQNKPLYFADRLYDSMKGKGTRDKVLIRIMVSRSEVDMLKIRSEFKRKYGKSLYYYIQQDTKGDYQKALLYLCGGDD

SEQ ID NO: 390 - protein, 911 aa, Mus musculus
MGTGTLSSLLLLLLLVTIGDADMKGHFDPAKCRYALGMQDRTIPDSDISVSSSWSDSTAARHSRLESSDGDGAWCPAGPVFPKEEEYLQVDLRRLHLVALVGTQGRHAGGLGKEFSRSYRLRYSRDGRRWMDWKDRWGQEVISGNEDPGGVVLKDLGPPMVARLVRFYPRADRVMSVCLRVELYGCLWRDGLLSYTAPVGQTMQLSEVMVHLNDSTYDGYTAGGLQYGGLGQLADGVVGLDDFRQSQELRVWPGYDYVGWSNQSFPTGYVEMEFEFDRLRTFQTMQVHCNNMHTLGARLPGGVECRFKRGPAMAWEGEPVRHALGGSLGDPRARAISVPLGGHVGRFLQCRFLFAGPWLLFSEISFISDVVNDSSDTFPPAPWWPPGPPPTNFSSLELEPRGQQPVAKAEGSPTAILIGCLVAIILLLLLIIALMLWRLHWRRLLSKAERRVLEEELTVHLSVPGDTILINNRPGPREPPPYQEPRPRGTPPHSAPCVPNGSALLLSNPAYRLLLATYARPPRGPGPPTPAWAKPTNTQACSGDYMEPEKPGAPLLPPPPQNSVPHYAEADIVTLQGVTGGNTYAVPALPPGAVGDGPPRVDFPRSRLRFKEKLGEGQFGEVHLCEVEDPQDLVSSDFPISVHKGHPLLVAVKILRPDATKNARNDFLKEVKIMSRLKDPNIIRLLGVCVQDDPLCMITDYMENGDLNQFLSARQLENKATQGLSGDTESDQGPTISYPMLLHVGAQIASGMRYLATLNFVHRDLATRNCLVGENFTIKIADFGMSRNLYAGDYYRVQGRAVLPIRWMAWECILMGKFTTASDVWAFGVTLWEVLMLCRSQPFGQLTDEQVIENAGEFFRDQGRQVYLSRPPACPQTLYELMLRCWSREPEQRPPFAQLHRFLADDALNTV

SEQ ID NO: 391 - protein, 61 aa, Mus musculus
MYIKPALPCLPFFVVFSINLLSRPEREWEGMPQKGSGRAKLLQSPNRKHISTNHNKCYIYM

SEQ ID NO: 392 - protein, 829 aa, Mus musculus
MDSWFILVLFGSGLIHVSANNATTVSPSLGTTRLIKTSTTELAKEENKTSNSTSSVISLSVAPTFSPNLTLEPTYVTTVNSSHSDNGTRRAASTESGGTTISPNGSWLIENQFTDAITEPWEGNSSTAATTPETFPPADETPIIAVMVALSSLLVIVFIIIVLYMLRFKKYKQAGSHSNSFRLSNGRTEDVEPQSVPLLARSPSTNRKYPPLPVDKLEEEINRRMADDNKIFREEFNALPACPIQATCEAASKEENKEKNRYVNILPFLSLAVSKDAVKALNKTTPLLERRFIGKSNSRGCLSDDHSRVHLTPVEGVPDSDYINASFINGYQEKNKFIAAQGPKEETVNDFWRMIWEQNTATIVMVTNLKERKECKCAQYWPDQGCWTYGNVRVSVEDVTVLVDYTVRKFCIQQVGDVTNRKPQRLITQFHFTSWPDFGVPFTPIGMLKFLKKVKACNPQYAGAIVVHCSAGVGRTGTFVVIDAMLDMMHSERKVDVYGFVSRIRAQRCQMVQTDMQYVFIYQALLEHYLYGDTELEVTSLETHLQKIYNKIPGTSNNGLEEEFKKLTSIKIQNDKMRTGNLPANMKKNRVLQIIPYEFNRVIIPVKRGEENTDYVNASFIDGYRQKDSYIASQGPLLHTIEDFWRMIWEWKSCSIVMLTELEERGQEKCAQYWPSDGLVSYGDITVELKKEEECESYTVRDLLVTNTRENKSRQIRQFHFHGWPEVGIPSDGKGMINIIAAVQKQQQQSGNHPITVHCSAGAGRTGTFCALSTVLERVKAEGILDVFQTVKSLRLQRPHMVQTLEQYEFCYKVVQEYIDAFSDYANFK

SEQ ID NO: 393 - protein, 1128 aa, Mus musculus
MAPVRTASLLCGLLALLTLCPEGNPQTVLTDDEIEEFLEGFLSELETQSPPREDDVEVQPLPEPTQRPRKSKAGGKQRADVEVPPEKNKDKEKKGKKDKGPKATKPLEGSTRPTKKPKEKPPKATKKPKEKPPKATKKPKEKPPKATKKPKEKPPKATKRPSAGKKFSTVAPLETLDRLLPSPSNPSAQELPQKRDTPFPNAWQGQGEETQVEAKQPRPEPEEETEMPTLDYNDQIEKEDYEDFEYIRRQKQPRPTPSRRRLWPERPEEKTEEPEERKEVEPPLKPLLPPDYGDSYVIPNYDDLDYYFPHPPPQKPDVGQEVDEEKEEMKKPKKEGSSPKEDTEDKWTVEKNKDHKGPRKGEELEEEWAPVEKIKCPPIGMESHRIEDNQIRASSMLRHGLGAQRGRLNMQAGANEDDYYDGAWCAEDESQTQWIEVDTRRTTRFTGVITQGRDSSIHDDFVTTFFVGFSNDSQTWVMYTNGYEEMTFYGNVDKDTPVLSELPEPVVARFIRIYPLTWNGSLCMRLEVLGCPVTPVYSYYAQNEVVTTDSLDFRHHSYKDMRQLMKAVNEECPTITRTYSLGKSSRGLKIYAMEISDNPGDHELGEPEFRYTAGIHGNEVLGRELLLLLMQYLCQEYRDGNPRVRNLVQDTRIHLVPSLNPDGYEVAAQMGSEFGNWALGLWTEEGFDIFEDFPDLNSVLWAAEEKKWVPYRVPNNNLPIPERYLSPDATVSTEVRAIISWMEKNPFVLGANLNGGERLVSYPYDMARTPSQEQLLAEALAAARGEDDDGVSEAQETPDHAIFRWLAISFASAHLTMTEPYRGGCQAQDYTSGMGIVNGAKWNPRSGTFNDFSYLHTNCLELSVYLGCDKFPHESELPREWENNKEALLTFMEQVHRGIKGVVTDEQGIPIANATISVSGINHGVKTASGGDYWRILNPGEYRVTAHAEGYTSSAKICNVDYDIGATQCNFILARSNWKRIREILAMNGNRPILGVDPSRPMTPQQRRMQQRRLQYRLRMREQMRLRRLNSTAGPATSPTPALMPPPSPTPAITLRPWEVLPTTTAGWEESETETYTEVVTEFETEYGTDLEVEEIEEEEEEEEEEMDTGLTFPLTTVETYTVNFGDF

SEQ ID NO: 394 - protein, 269 aa, Mus musculus
MFLVNSFLKGGGGGGGGGGLGGGLGNVLGGLISGAAGGGGGGGGGGMGLGGGGGGGGTAMRILGGVISAISEAAAQYNPEPPPPRSHYSNIEANESEEVRQFRKLFVQLAGDDMEVSATELMNILNKVVTRHPDLKTDGFGIDTCRSMVAVMDSDTTGKLGFEEFKYLWNNIKKWQAIYKRFDTDRSGTIGSHELPGAFEAAGFHLNEHLYSMIIRRYADESGNMDFDNFISCLVRLDAMFRAFKSLDKNGTGQIQVNIQEWLQLTMYS

SEQ ID NO: 395 - protein, 1657 aa, Mus musculus
MSAAEEVDGLGVVRPHYGSVLDNERLTAEEMDERRRQNVAYEYLCHLEEAKRWMEACLGEDLPPTTELEEGLRNGVYLAKLGNFFSPKVVSLKKIYDREQTRYKATGLHFRHTDNVIQWLNAMDEIGLPKIFYPETTDIYDRKNMPRCIYCIHALSLYLFKLGLAPQIQDLYGKVDFTEEEINNMKIELEKYGIQMPAFSKIGGILANELSVDEAALHAAVIAINEAIDRRVAADTFTALKNPNAMLVNLEEGLAPTYQDVLYQAKQDKMTNAKNRTENSDRERDVYEELLTQAEIQGNVNKVNTSSALANISLALEQGCAVTLLKALQSLALGLRGLQTQNSDWYMKQLQSDLQQKRQSGQTDPLQKEEVQAGVDAANSAAQQYQRRLAAVAAINAAIQKGIAEKTVLELMNPEAQLPQVYPFAADLYQKELATLQQQSPEHSLTHPELTVAVEMLSSVALINRALESGDMTTVWKQLSSSVTGLTNIEEENCQRYLDELMKLKAQAHAENNAFITWNDIQACVDHVNLVVHEEHERILAIGLINEALDEGDAQKTLQALQIPAAKLEGVLAEVAQHYQDTLIRAKREKAQETQDESAVLWLDEIQGGIWQSNKDTQEAQRFALGISAINEAVDSGDVGRTLSALRSPDVGLYGVIPECGETYQSDLAEAKKKRLAAGDNNSKWVKHWVKGGYHYYHNLETQAGGWAEPPDFVQNSVQLSREEIQSSISGVTAAYNREQLWLANEGLITKLQACCRGYLVRQEFRSRMNFLKKQIPAITCIQSQWRGYKQKKAYQDRLAYLHSHKDEVVKIQSLARMHQARKRYRDRLQYFRDHINDIIKIQAFIRANKARDDYKTLINAEDPPMIVVRKFVHLLDQSDQDFQEELDLMKMREEVITLIRSNQQLENDLNLMDIKIGLLVKNKITLQDVVSHSKKLTKKNKEQLSDMMMINKQKGGLKALSKEKREKLEAYQHLFYLLQTNPTYLAKLIFQMPQNKSTKFMDSVIFTLYNYASNQREEYLLLRLFQTALQEEIKSKVDQIQEIVTGNPTVIKMVVSFNRGARGQNALRQILAPVVKEIMDDKSLNIKTDPVDIYKSWVNQMESQTGEASKLPYDVTPEQALSHEEVKTRLDNSIRNMRAVTDKFLSAIVSSVDKIPYGMRFIAKVLKDSLHEKFPDAGEDELLKIIGNLLYYRYMNPAIVAPDAFDIIDLSAGGQLTTDQRRNLGSIAKMLQHAASNKMFLGDNAHLSIINEYLSQSYQKFRRFFQLACDVPELQDKFNVDEYSDLVTLTKPVIYISIGEIINTHTLLLDHQDAIAPEHNDPIHELLDDLGEVPTIESLIGESCGNSNDPNKEALAKTEVSLTLTNKFDVPGDENAEMDARTILLNTKRLIVDVIRFQPGETLTEILETPATNEQEAEHQRAMQRRAIRDAKTPDKMKKSKPMKEDNNLSLQEKKEKIQTGLKKLTELGTVDPKNRYQELINDIAKDIRNQRRYRQRRKAELVKLQQTYSALNSKATFYGEQVDYYKSYIKTCLDNLASKGKVSKKPREMKGKKSKKISLKYTAARLHEKGVLLEIEDLQANQFKNVIFEIGPTEEVGDFEVKAKFMGVQMETFMLHYQDLLQLQYEGVAVMKLFDRAKVNVNLLIFLLNKKFYGK

SEQ ID NO: 396 - protein, 506 aa, Mus musculus
MALGTLFLALAAGLSTASPPNILLIFADDLGYGDLGSYGHPSSTTPNLDQLAEGGLRFTDFYVPVSLCTPSRAALLTGRLPVRSAMYPGVLGPSSQGGLPLEELTLAEVLAARGYLTGMAGKWHLGVGPEGAFLPPHQGFHRFLGIPYSHDQGPCQNLTCFPPDIPCKGGCDQGLVPIPLLANLTVEAQPPWLPGLEARYVSFSRDLMADAQRQGRPFFLYYASHHTHYPQFSGQSFTKRSGRGPFGDSLMELDGAVGALMTTVGDLGLLEETLVIFTADNGPELMRMSNGGCSGLLRCGKGTTFEGGVREPALVYWPGHITPGVTHELASSLDLLPTLAALTGAPLPNVTLDGVDISPLLLGTGKSPRKSVFFYPPYPDEIHGVFAVRNGKYKAHFFTQGSAHSDTTSDPACHAANRLTAHEPPLLYDLSQDPGENYNVLESIEGVSPEALQALKHIQLLKAQYDAAMTFGPSQIAKGEDPALQICCQPSCTPHPVCCHCPGSQS

SEQ ID NO: 397 - protein, 224 aa, Mus musculus
MPGGLLLGDEAPNFEANTTIGRIRFHDFLGDSWGILFSHPRDFTPVCTTELGRAAKLAPEFAKRNVKLIALSIDSVEDHLAWSKDINAYNGETPTEKLPFPIIDDKGRDLAILLGMLDPVEKDANNMPVTARVVFIFGPDKKLKLSILYPATTGRNFDEILRVVDSLQLTGTKPVATPVDWKKGESVMVVPTLSEEEAKQCFPKGVFTKELPSGKKYLRYTPQP

SEQ ID NO: 398 - protein, 148 aa, Mus musculus
MKVASGSAAAAAGPSCSLKAGRTAGEVVLGLSEQSVAISRCAGTRLPALLDEQQVNVLLYDMNGCYSRLKELVPTLPQNRKVSKVEILQHVIDYIRDLQLELNSESEVGTTGGRGLPVRAPLSTLNGEISALAAEAACVPADDRILCR

SEQ ID NO: 399 - protein, 572 aa, Mus musculus
MEPRAPRRRHTHQRGYLLTRDPHLNKDLAFTLEERQQLNIHGLLPPCIISQELQVLRIIKNFERLNSDFDRYLLLMDLQDRNEKLFYSVLMSDVEKFMPIVYTPTVGLACQQYSLAFRKPRGLFISIHDKGHIASVLNAWPEDVVKAIVVTDGERILGLGDLGCNGMGIPVGKLALYTACGGVNPQQCLPITLDVGTENEELLKDPLYIGLRHRRVRGPEYDAFLDEFMEAASSKYGMNCLIQFEDFANRNAFRLLNKYRNKYCTFNDDIQGTASVAVAGLLAALRITKNKLSDQTVLFQGAGEAALGIAHLVVMAMEKEGLSKENARKKIWLVDSKGLIVKGRASLTEEKEVFAHEHEEMKNLEAIVQKIKPTALIGVAAIGGAFTEQILKDMAAFNERPIIFALSSPTSKAECSADECYKVTKGRAIFASGSPFDPVTLPDGRTLFPGQGNNSYVFPGVALGVVACGLRHIDDKVFLTTREVISQQVSDKHLQEGRLYPPLNTIRGVSLKIAVKIVQDAYKEKMATVYPEPQNKEEFVSSQMYSTNYDQILPDCYPWPAEVQKIQTKVNQ

SEQ ID NO: 400 - protein, 61 aa, Mus musculus
MDPNCSCASDGSCSCAGACKCKQCKCTSCKKSCCSCCPVGCAKCSQGCICKEASDKCSCCA

SEQ ID NO: 401 - protein, 700 aa, Mus musculus
MAGIAIKLAKDREAAEGLGSHERAIKYLNQDYETLRNECLEAGALFQDPSFPALPSSLGYKELGPYSSKTRGIEWKRPTEICADPQFIIGGATRTDICQGALGDCWLLAAIASLTLNEEILARVVPPDQSFQENYAGIFHFQFWQYGEWVEVVVDDRLPTKDGELLFVHSAEGSEFWSALLEKAYAKINGCYEALSGGATTEGFEDFTGGIGEWYELRKPPPNLFKIIQKALEKGSLLGCSIDITSAADSEAVTYQKLVKGHAYSVTGAEEVESSGSLQKLIRIRNPWGQVEWTGKWNDNCPSWNTVDPEVRANLTERQEDGEFWMSFSDFLRHYSRLEICNLTPDTLTCDSYKKWKLTKMDGNWRRGSTAGGCRNYPNTFWMNPQYLIKLEEEDEDEEDGERGCTFLVGLIQKHRRRQRKMGEDMHTIGFGIYEVPEELTGQTNIHLGKNFFLTTRARERSDTFINLREVLNRFKLPPGEYVLVPSTFEPHKDGDFCIRVFSEKKADYQAVDDEIEANIEEIDANEEDIDDGFRRLFVQLAGEDAEISAFELQTILRRVLAKRQDIKSDGFSIETCKIMVDMLDEDGSGKLGLKEFYILWTKIQKYQKIYREIDVDRSGTMNSYEMRKALEEAGFKLPCQLHQVIVARFADDELIIDFDNFVRCLVRLETLFKIFKQLDPENTGTIQLNLASWLSFSVL

SEQ ID NO: 402 - protein, 314 aa, Mus musculus
MFQPAGHGQDWAMEGPRDGLKKERLVDDRHDSGLDSMKDEEYEQMVKELREIRLQPQEAPLAAEPWKQQLTEDGDSFLHLAIIHEEKPLTMEVIGQVKGDLAFLNFQNNLQQTPLHLAVITNQPGIAEALLKAGCDPELRDFRGNTPLHLACEQGCLASVAVLTQTCTPQHLHSVLQATNYNGHTCLHLASTHGYLAIVEHLVTLGADVNAQEPCNGRTALHLAVDLQNPDLVSLLLKCGADVNRVTYQGYSPYQLTWGRPSTRIQQQLGQLTLENLQMLPESEDEESYDTESEFTEDELPYDDCVFGGQRLTL

SEQ ID NO: 403 - protein, 249 aa, Mus musculus
MATLRVHPEAQAKVDVFREDLCSKTENLLGSYFPKKISELDAFLKEPALNEANLSNLKAPLDIPVPDPVKEKEKEERKKQQEKEEKEEKKKGDEDDKGPPCGPVNCNEKIVVLLQRLKPEIKDVTEQLNLVTTWLQLQIPRIEDGNNFGVAVQEKVFELMTNLHTKLEGFHTQISKYFSERGDAVAKAAKQPHVGDYRQLVHELDEAEYQEIRLMVMEIRNAYAVLYDIILKNFEKLKKPRGETKGMIY

SEQ ID NO: 404 - protein, 966 aa, Mus musculus
MVNSRRVQPQPPGDAGRSPAPRASGPGRLVAGGAGLAVPGGLGEQRGLEIEMERIRQAAARDPPAGASASPSPPLSSCSRQAWSRDNPGFEAEEDDDDDEVEGEEGGMVVEMDVEWRPGSRRSASSSAVSSVGARGRGLGSYRGAAHLSGRRRRLEDQGAQCPSPAGGGDPLHRHLPLEGQPPRVAWAERLVRGLRGLWGTRLMEESNANREKYLKSVLRELVTYLFFLVVLCILTYGMMSSNVYYYTRTLSQLFIDTPVSKTEKTNFKTLSSMEDFWKFTEGSFLDGLYWKAQTSNHTQADNRSFIFYENLLLGVPRLRQLRVRNGSCSIPQDLRDEIKECYDVYSVSSEDRAPFGPRNGTAWIYTSERELNGSSHWGIIASYSGAGYYLDLSRTREETAAQLAGLRRNFWLDRGTRAAFIDFSVYNANINLFCVVRLLAEFPATGGVVPSWQFQPVKLIRYVTAFDFFLAACEIIFCFFIIYYVVEEILEIRIHRLSYFRSFWNCLDVVIVVLSVVAMVINIYRMSNAEGLLQFLEDQNSFPNFEHVAYWQIQFNNIAAVMVFLVWIKLFKFINFNRTMSQLSTTMSRCAKDLFGFTIMFSIIFLAYAQLAYLVFGTQVDDFSTFQECIFTQFRIILGDINFAEIEEANRVLGPLYFTTFVFFMFFILLNMFLAIINDSYSEVKSDLAQQKAEMELSDLIRKGCQKALVKLKLKRNTVDAISESLRQGGGKLNFDELRQDLKGKGHTDAEIEAIFTKYDQDGDQELTEREHQQMRDDLEKEREDLDLEHSSLPRPMSSRSFPRSLDDSEEEDDEDSGHSSRRRGSISSGVSYEEFQVLVRRVDRMEHSIGSIVSKIDAVIVKLEIMERAKLKRREVLGRLLDGVAEDARLGRDSEIHREQMERLVREELERWESDDAASQTGHGVSTQVGLGGQPHPRNSRPPSSQSAEGLEGGSGNGSANVHA

SEQ ID NO: 405 - protein, 474 aa, Mus musculus
MPGTALSPLLLLLLLSWASRNEAAPDQDEIDCLPGLAKQPSFRQYSGYLRASDSKHFHYWFVESQNDPKNSPVVLWLNGGPGCSSLDGLLTEHGPFLIQPDGVTLEYNPYAWNLIANVLYIESPAGVGFSYSDDKMYVTNDTEVAENNYEALKDFFRLFPEYKDNKLFLTGESYAGIYIPTLAVLVMQDPSMNLQGLAVGNGLASYEQNDNSLVYFAYYHGLLGNRLWTSLQTHCCAQNKCNFYDNKDPECVNNLLEVSRIVGKSGLNIYNLYAPCAGGVPGRHRYEDTLVVQDFGNIFTRLPLKRRFPEALMRSGDKVRLDPPCTNTTAPSNYLNNPYVRKALHIPESLPRWDMCNFLVNLQYRRLYQSMNSQYLKLLSSQKYQILLYNGDVDMACNFMGDEWFVDSLNQKMEVQRRPWLVDYGESGEQVAGFVKECSHITFLTIKGAGHMVPTDKPRAAFTMFSRFLNKEPY

SEQ ID NO: 406 - protein, 749 aa, Mus musculus
MSQWFELQQLDSKFLEQVHQLYDDSFPMEIRQYLAQWLEKQDWEHAAYDVSFATIRFHDLLSQLDDQYSRFSLENNFLLQHNIRKSKRNLQDNFQEDPVQMSMIIYNCLKEERKILENAQRFNQAQEGNIQNTVMLDKQKELDSKVRNVKDQVMCIEQEIKTLEELQDEYDFKCKTSQNREGEANGVAKSDQKQEQLLLHKMFLMLDNKRKEIIHKIRELLNSIELTQNTLINDELVEWKRRQQSACIGGPPNACLDQLQSWFTIVAETLQQIRQQLKKLEELEQKFTYEPDPITKNKQVLSDRTFLLFQQLIRSSFVVERQPCMPTHPQRPLVLKTGVQFTVKLRLLVKLQELNYNLKVKVSFDKDVNEKNTVKGFRKFNILGTHTKVMNMEESTNGSLAAEFRHLQLKEQKNAGNRTNEGPLIVTEELHSLSFETQLCQPGLVIDLETTSLPVVVISNVSQLPSGWASILWYNMLVTEPRNLSFFLNPPCAWWSQLSEVLSWQFSSVTKRGLNADQLSMLGEKLLGPNAGPDGLIPWTRFCKENINDKNFSFWPWIDTILELIKKHLLCLWNDGCIMGFISKERERALLKDQQPGTFLLRFSESSREGAITFTWVERSQNGGEPDFHAVEPYTKKELSAVTFPDIIRNYKVMAAENIPENPLKYLYPNIDKDHAFGKYYSRPKEAPEPMELDDPKRTGYIKTELISVSEVHPSRLQTTDNLLPMSPEEFDEMSRIVGPEFDSVMSTV

SEQ ID NO: 407 - protein, 272 aa, Mus musculus
MKSKKGLVAASGSDSEDEDSMDSPLDLSSSAASGKRRRRGNLPKESVQILRDWLYEHRYNAYPSEQEKALLSQQTHLSTLQVCNWFINARRRLLPDMLRKDGKDPNQFTISRRGAKISEASSIEAAMGIKNFMPTLEESPFHSCVVGPNPTLGRPVSPKPPSPGSILARPSVICHTTVTALKDGPFSLCQPIGVGQSTDVPQIAPSNFTDTSLVYPEDTCKSGPSPNPQSGLFNTPPPTPPDLNQDFSGFQLLVDVALKRAAEMELQAKLTA

SEQ ID NO: 408 - protein, 123 aa, Mus musculus
MRAQRGLILLLLLLAVFCSTAVSLTCYHCFQPVVSSCNMNSTCSPDQDSCLYAVAGMQVYQRCWKQSDCHGEIIMDQLEETKLKFRCCQFNLCNKSDGSLGKTPLLGTSVLVAILNLCFLSHL

SEQ ID NO: 409 - protein, 504 aa, Mus musculus
MRFSCLALLPGVALLLASARLAAASDVLELTDENFESRVSDTGSAGLMLVEFFAPWCGHCKRLAPEYEAAATRLKIVPLAKVDCTANTNTCNKYGVSGYPTLKIFRAGEEAGAYDGPRTADGIVSHLKKQAGPASVPLRTEEEFKKFISDKDASVVGFFRDLFSDGHSEFLKAASNLRDNYRFAHTNIESLVKEYDDNGEGITIFRPLHLANKFEDKTVAYTEKKMTSAKIKKFIQDSIFGLCPHMTEDNKDLIQGKDLLTAYYDVDYEKNAKGSNYWRNRVMMVAKKFLDAGHKLNFAVASRKTFSHELSDFSLESTTGEVPVVAIRTAKGEKFVMQEEFSRDGKALEQFLQEYFDGNLKRYLKSEPIPESNEGPVKVVVAENFDDIVNEEDKDVLIEFYAPWCGHCKNLEPKYKELGEKLSKDPNIVIAKMDATANDVPSPYEVKGFPTIYFSPANKKLTPKKYEGGRELNDFISYLQREATNPPIIQEEKPKKKKKAQEDL

SEQ ID NO: 410 - protein, 493 aa, Mus musculus
MASTVRPSFSLGNETLKVPLAIFALNRQRLCERLRKNGAVQAASAVVLQGGEEMQRYCTDTSIIFRQESFFHWAFGVVESGCYGVIDVDTGKSTLFVPRLPDSYATWMGKIHSKEYFKEKYAVDDVQYTDEIASVLTSRNPSVLLTLRGVNTDSGSVCREASFEGISKFNVNNTILHPEIVECRVFKTDMELEVLRYTNRISSEAHREVMKAVKVGMKEYEMESLFQHYCYSRGGMRHTSYTCICCSGENAAVLHYGHAGAPNDRTIKDGDICLFDMGGEYYCFASDITCSFPANRKFTEDQKAIYEAVLRSCRTVMSTMKPGVWWPDMHRLADRIHLEELARIGLLSGSVDAMLQVHLGAVFMPHGLGHFLGLDVHDVGGYPEGVERIDEPGLRSLRTARHLEPGMVLTVEPGIYFIDHLLDQALADPAQACFFNQEVLQRFRNFGGVRIEEDVVVTDSGMELLTCVPRTVEEIEACMAGCDKASVPFSGQK

SEQ ID NO: 411 - protein, 452 aa, Mus musculus
MDDIFTQCREGNAVAVRLWLDNTENDLNQGDDHGFSPLHWACREGRSAVVEMLIMRGARINVMNRGDDTPLHLAASHGHRDIVQKLLQYKADTNAVNEHGNVPLHYACFWGQDQVAEDLVANGALVSICNKYGEMPVDKAKAPLRELLRERAEKMGQNLNRIPYKDTFWKGTTRTRPRNGTLNKHSGIDFKQLNFLAKLNENHSGELWKGRWQGNDIVVKVLKVRDWSTRKSRDFNEECPRLRIFSHPNVLPVLGACQAPPAPHPTLITHWMPYGSLYNVLHEGTNFVVDQSQAVKFALDMARGMAFLHTLEPLIPRHALNSRSVMIDEDMTARISMADVKFSFQCPGRMYAPAWVAPEALQKKPEDTNRRSADMWSFAVLLWELVTREVPFADLSNMEIGMKVALEGLRPTVPPGISPHVCKLMKICMNEDPAKRPKFDMIVPILEKMQDK

SEQ ID NO: 412 - protein, 971 aa, Mus musculus
MDTDLYDEFGNYIGPELDSDEDDDELGRETKDLDEDEDEDEDDVGEHEDDHPGMEVVLHEDKKYYPTAEEVYGPEVETIVQEEDTQPLTEPIIKPVKTKKFTLMEQTLPVTVYEMDFLADLMDNSELIRNVTLCGHLHHGKTCFVDCLIEQTHPEIRKRYDQDLCYTDILFTEQERGVGIKSTPVTVVLPDTKGKSYLFNIMDTPGHVNFSDEVTAGLRISDGVVLFIDAAEGVMLNTERLIKHAVQERLAVTVCINKIDRLILELKLPPTDAYYKLRHIVDEVNGLISMYSTDENLILSPLLGNVCFSSSQYSICFTLGSFAKIYADTFGDINYQEFAKRLWGDIYFNPKTRKFTKKAPSSSSQRSFVEFILEPLYKILAQVVGDVDTSLPRTLDELGIHLTKEELKLNIRPLLRLVCKKFFGEFTGFVDMCVQHIPSPKVGAKPKIEHTYTGGVDSDLGEAMSDCDPDGPLMCHTTKMYSTDDGVQFHAFGRVLSGTIHAGQPVKVLGENYTLEDEEDSQICTVGRLWISVARYHIEVNRVPAGNWVLIEGVDQPIVKTATITEPRGNEEAQIFRPLKFNTTSVIKIAVEPVNPSELPKMLDGLRKVNKSYPSLTTKVEESGEHVILGTGELYLDCVMHDLRKMYSEIDIKVADPVVTFCETVVETSSLKCFAETPNKKNKITMIAEPLEKGLAEDIENEVVQITWNRKKLGEFFQTKYDWDLLAARSIWAFGPDATGPNILVDDTLPSEVDKALLGSVKDSIVQGFQWGTREGPLCDELIRNVKFKILDAVVAQEPLHRGGGQIIPTARRVVYSAFLMATPRLMEPYYFVEVQAPADCVSAVYTVLARRRGHVTQDAPIPGSPLYTIKAFIPAIDSFGFETDLRTHTQGQAFSLSVFHHWQIVPGDPLDKSIVIRPLEPQPAPHLAREFMIKTRRRKGLSEDVSISKFFDDPMLLELAKQDVVLNYPM

SEQ ID NO: 413 - protein, 323 aa, Mus musculus
MASIWVGPRGTIKDYPGFSPSVDAEAIRKAIRGLGTDEKTLINILTERSNAQRQLIVKQYQAAYEQELKDDLKGDLSGHFEHVMVALVTAPALFDANELKKSMKGTGTDEDALIEILTTRSSRQMKEISQAYYTVYKKSLGDDISSETSGDFRKALLTLADGRRDESLKVDEHLAKKDAQILYNAGENKWGTDEDKFTEVLCLRSFPQLKLTFDEYRNISQKDIEDSIKGELSGHFEDLLLAIVHCARNTPAFLAERLHQALKGAGTDEFTLNRIMVSRSEIDLLDIRHEFKKHYGYSLYSAIQSDTSGDYRTVLLKICGEDD

SEQ ID NO: 414 - protein, 661 aa, Mus musculus
  MOD_RES (277)..(277): Variable amino acid
  MOD_RES (279)..(279): Variable amino acid
MNPDLRKERAAATFNPELITHVLDGSPENTRRRREIENLILNDPDFQHEDYNFLTRSQRYEVAVKKSATMVKKMREFGIADPEEIMWFKKLHMVNFVEPVGLNYSMFIPTLLNQGTTAQQEKWMHPSQELQIIGTYAQTEMGHGTHLRGLETTATYDPKTQEFILNSPTVTSIKWWPGGLGKTSNHAIVLAQLITRGECYGLHAFVVPIREIGTHKPLPGITVGDIGPKFGYEEMDNGYLKMDNYRIPRENMLMKYAQVKPDGTYVKPLSNKLTYGXMXFVRSFLVGSAAQSLSKACTIAIRYSAVRRQSEIKRSEPEPQILDFQTQQYKLFPLLATAYAFHFLGRYIKETYMRINESIGQGDLSELPELHALTAGLKAFTTWTANAGIEECRMACGGHGYSHSSGIPNIYVTFTPACTFEGENTVMMLQTARFLMKIYDQVQSGKLVGGMVSYLNDLPSQRIQPQQVAVWPTLVDINSLDSLTEAYKLRAARLVEIAAKNLQAQVSHRKSKEVAWNLTSVDLVRASEAHCHYVTVKVFADKLPKIQDRAVQAVLRNLCLLYSLYGISQKGGDFLEGNIITGAQMSQVNSRILELLTVTRPNAVALVDAFDFKDVTLGSVLGRYDGNVYENLFEWAKKSPLNKTEVHQSYYKHLKPLQSKL

SEQ ID NO: 415 - protein, 893 aa, Mus musculus
MSVDNWLLHPLWGQTFLLLLSVAVAQAHWPSEPSEAVRDWKNQLEASMHSVLSDFQEAVPTVVGIPDGTAVVGRSFRVSIPTDLIASSGEIIKVSAAGKEALPSWLHWDPHSHILEGLPLDTDKGVHYISVSAARLGANGSHVPQTSSVFSIEVYPEDHNEPQSVRAASSDPGEVVPSACAADEPVTVLTVILDADLTKMTPKQRIDLLNRMQSFSEVELHNMKLVPVVNNRLFDMSAFMAGPGNAKKVVENGALLSWKLGCSLNQNSVPDIRGVETPAREGAMSAQLGYPVVGWHIANKKPTLPKRLRRQIHATPTPVTAIGPPTTAIQEPPSRIVPTPTSPAIAPPTETMAPPVRDPVPGKPTVTIRTRGAIIQTPTLGPIQPTRVSEAGTTVPGQIRPTLTIPGYVEPTAVITPPTTTTKKPRVSTPKPATPSTDSSTTTTRRPTKKPRTPRPVPRVTTKAPITRLETASPPTRIRTTTSGVPRGGEPNQRPELKNHIDRVDAWVGTYFEVKIPSDTFYDNEDTTTDKLKLTLKLREQQLVGEKSWVQFNSNSQLMYGLPDSSHVGKHEYFMHATDKGGLSAVDAFEIHVHKRPQGDKAPARFKARLAGDPAPVVNDIHKKIALVKKLAFAFGDRNCSSITLQNITRGSIVVEWTNNTLPLEPCPKEQIIGLSRRIADENGKPRPAFSNALEPDFKALSIAVTGSGSCRHLQFIPVAPPSPGSSAAPATEVPDRDPEKSSEDDVYLHTVIPAVVVAAILLIAGIIAMICYRKKRKGKLTLEDQATFIKKGVPIIFADELDDSKPPPSSSMPLILQEEKAPLPPPEYPNQSMPETTPLNQDTVGEYTPLRDEDPNAPPYQPPPPFTAPMEGKGSRPKNMTPYRSPPPYVPP

SEQ ID NO: 416 - protein, 1799 aa, Mus musculus
MEWASGEPGRGRQGQPLPWELRLGLLLSVLAATLAQAPSLDVPGCSRGSCYPATGDLLVGRADRLTASSTCGLHSPQPYCIVSHLQDEKKCFLCDSRRPFSARDNPNSHRIQNVVTSFAPQRRTAWWQSENGVPMVTIQLDLEAEFHFTHLIMTFKTFRPAAMLVERSADFGRTWHVYRYFSYDCGADFPGIPLAPPRRWDDVVCESRYSEIEPSTEGEVIYRVLDPAIPIPDPYSSRIQNLLKITNLRVNLTRLHTLGDNLLDPRREIREKYYYALYELVIRGNCFCYGHASQCAPAPGAPAHAEGMVHGACICKHNTRGLNCEQCQDFYQDLPWHPAEDGHTHACRKCECNGHTHSCHFDMAVYLASGNVSGGVCDGCQHNTAGRHCEFCRPFFYRDPTKDMRDPAVCRPCDCDPMGSQDGGRCDSHDDPVLGLVSGQCRCKEHVVGTRCQQCRDGFFGLSASDPRGCQRCQCNSRGTVPGSSPCDSSSGTCFCKRLVTGHGCDRCLPGHWGLSHDLLGCRPCDCDVGGALDPQCDEATGQCRCRQHMIGRRCEQVQPGYFRPFLDHLTWEAEAAQGQGLEVVERLVTNRETPSWTGPGFVRLREGQEVEFLVTSLPRAMDYDLLLRWEPQVPEQWAELELMVQRPGPVSAHSPCGHVLPKDDRIQGMLHPNTRFLVFPRPVCLEPGISYKLKLKLIGTGGRAQPETSYSGLLIDSLVLQPHVLVLEMFSGGDAAALERRTTFERYRCHEEGLMPSKAPLSETCAPLLISVSALIYNGALPCQCDPQGSLSSECSPHGGQCRCKPGVVGRRCDVCATGYYGFGPAGCQACQCSPDGALSALCEGTSGQCPCRPGAFGLRCDHCQRGQWGFPNCRPCVCNGRADECDTHTGACLGCRDYTGGEHCERCIAGFHGDPRLPYGGQCRPCPCPEGPGSQRHFATSCHRDGYSQQIVCQCREGYTGLRCEACAPGHFGDPSKPGGRCQLCECSGNIDPMDPDACDPHTGQCLRCLHNTEGPHCGYCKPGFHGQAARQSCHRCTCNLLGTDPRRCPSTDLCHCDPSTGQCPCLPHVQGLNCDHCAPNFWNFTSGRGCQPCACHPSRARGPTCNEFTGQCHCHAGFGGRTCSECQELYWGDPGLQCRACDCDPRGIDKPQCHRSTGHCSCRPGVSGVRCDQCARGFSGVFPACHPCHACFGDWDRVVQDLAARTRRLEQWAQELQQTGVLGAFESSFLNMQGKLGMVQAIMSARNASAASTAKLVEATEGLRHEIGKTTERLTQLEAELTAVQDENFNANHALSGLERDGLALNLTLRQLDQHLEILKHSNFLGAYDSIRHAHSQSTEAERRANASTFAVPSPVSNSADTRRRTEVLMGAQKENFNRQHLANQQALGRLSAHAHTLSLTGINELVCGAPGDAPCATSPCGGAGCRDEDGQPRCGGLGCSGAAATADLALGRARHTQAELQRALVEGGGILSRVSETRRQAEEAQQRAQAALDKANASRGQVEQANQELRELIQNVKDFLSQEGADPDSIEMVATRVLDISIPASPEQIQRLASEIAERVRSLADVDTILAHTMGDVRRAEQLLQDAHRARSRAEGERQKAETVQAALEEAQRAQGAAQGAIWGAVVDTQNTEQTLQRVQERMAGAEKSLNSAGERARQLDALLEALKLKRAGNSLAASTAEETAGSAQSRAREAEKQLREQVGDQYQTVRALAERKAEGVLAAQARAEQLRDEARDLLQAAQDKLQRLQELEGTYEENERALEGKAAQLDGLEARMRSVLQAINLQVQIYNTCQ

SEQ ID NO: 417 - protein, 98 aa, Mus musculus
MAAETLTELEAAIETVVSTFFTFAGREGRKGSLNINEFKELATQQLPHLLKDVGSLDEKMKTLDVNQDSELRFSEYWRLIGELAKEVRKEKALGIRKK

SEQ ID NO: 418 - protein, 236 aa, Mus musculus
MGVEGCTKCIKYLLFVFNFVFWLAGGVILGVALWLRHDPQTTSLLYLELGNKPAPNTFYVGIYILIAVGAVMMFVGFLGCYGAIQESQCLLGTFFTCLVILFACEVAAGIWGFVNKDQIAKDVKQFYDQALQQAVMDDDANNAKAVVKTFHETLNCCGSNALTTLTTTILRNSLCPSGGNILTPLLQQDCHQKIDELFSGKLYLIGIAAIVVAVIMIFEMILSMVLCCGIRNSSVY

SEQ ID NO: 419 - protein, 196 aa, Mus musculus
MNHMGMNHMEMHHHMGMYHTDDNITMPPHHHPTTSASHSHGGGDSMMMMPMTFYFDFKNVNLLFSGLVINTPGEMAGAFVAVFLLAMFYEGLKIAREGLLRKSQVSIRYNSMPVPGPNGTILMETHKTVGQQMLSFPHLLQTVLHIIQVVISYFLMLIFMTYNGYLCIAVAAGAGTGYFLFSWKKAVVVDITEHCH

SEQ ID NO: 420 - protein, 827 aa, Mus musculus
MEESSVTVGTIDVSYLPSSSEYSLGRCKHTSEDWVDCGFKPTFFRSATLKWKESLMSRKRPFVGRCCYSCTPQSWERFFNPSIPSLGLRNVIYINETHTRHRGWLARRLSYILFVQERDVHKGMFATSVTENVLSSSRVQEAIAEVAAELNPDGSAQQQSKAIQKVKRKARKILQEMVATVSPGMIRLTGWVLLKLFNSFFWNIQIHKGQLEMVKAATETNLPLLFLPVHRSHIDYLLLTFILFCHNIKAPYIASGNNLNIPVFSTLIHKLGGFFIRRRLDETPDGRKDILYRALLHGHVVELLRQQQFLEIFLEGTRSRSGKTSCARAGLLSVVVDTLSSNTIPDILVIPVGISYDRIIEGHYNGEQLGKPKKNESLWSVARGVIRMLRKNYGYVRVDFAQPFSLKEYLEGQSQKPVSAPLSLEQALLPAILPSRPNDVADEHQDLSSNESRNPADEAFRRRLIANLAEHILFTASKSCAIMSTHIVACLLLYRHRQGIHLSTLVEDFFVMKEEVLARDFDLGFSGNSEDVVMHAIQLLGNCVTITHTSRKDEFFITPSTTVPSVFELNFYSNGVLHVFIMEAIIACSIYAVLNKRCSGGSAGGLGNLISQEQLVRKAASLCYLLSNEGTISLPCQTFYQVCHETVGKFIQYGILTVAEQDDQEDVSPGLAEQQWDKKLPELNWRSDEEDEDSDFGEEQRDCYLKVSQSKEHQQFITFLQRLLGPLLEAYSSAAIFVHNFSGPVPESEYLQKLHRYLITRTERNVAVYAESATYCLVKNAVKMFKDIGVFKETKQKRVSVLELSSTFLPQCNRQKLLEYILSFVVL

SEQ ID NO: 421 - protein, 260 aa, Mus musculus
MKPAAALRRPSERMHLLTLHLLLLLLGSSTKAGEIIGGTECIPHSRPYMAYLEIVTSENYLSACSGFLIRRNFVLTAAHCAGRSITVLLGAHNKTSKEDTWQKLEVEKQFLHPKYDENLVVHDIMLLKLKEKAKLTLGVGTLPLSANFNFIPPGRMCRAVGWGRTNVNEPASDTLQEVKMRLQEPQACKHFTSFRHNSQLCVGNPKKMQNVYKGDSGGPLLCAGIAQGIASYVHRNAKPPAVFTRISHYRPWINKILREN

SEQ ID NO: 422 - protein, 186 aa, Mus musculus
MEEERRLRGRLSRRRPPAGGGPPNCRPWFLSEGSKSEPWAALLRSTVSGTADWTPNRQPLPPLPAFPSQESLPDPESTVPPEAFTVGSKTFSWTPLPPALRGSGSSRHLFCEPEGSLGSPTPSLKGCPALNSGRTPSAQECVPVQSPLALLSCPLCQKAFDPKLTQLDVDSHLAQCLAECTEDVVW

SEQ ID NO: 423 - protein, 323 aa, Mus musculus
MSDGAAARRWGKCGHSCSRESIMVAFKGVWTQAFWKAVSAEFLATLIFVLLGVGSTINWGGSENPLPVDMVLISLCFGLSIATMVQCFGHISGGHINPAVTVAMVCTRKISIAKSVFYIIAQCLGAIIGAGILYLVTPPSVVGGLGVTTVHGNLTAGHGLLVELIITFQLVFTIFASCDSKRTDVTGSIALAIGFSVAIGHLFAINYTGASMNPARSFGPAVIMGNWANHWIYWVGPIMGAVLAGALYEYVFCPDVELKRRLKEAFSKAAQQTKGSYMEVEDNRSQVETEDLILKPGVVHVIDIDRGEEKKGKDSSGEVLSSV

SEQ ID NO: 424 - protein, 148 aa, Mus musculus
MQVPVMLLGLLFTVAGWSIHVLAQPDAVNAPLTCCYSFTSKMIPMSRLESYKRITSSRCPKEAVVFVTKLKREVCADPKKEWVQTYIKNLDRNQMRSEPTTLFKTASALRSSAPLNVKLTRKSEANASTTFSTTTSSTSVGVTSVTVN

SEQ ID NO: 425 - protein, 504 aa, Mus musculus
MVAPGSVGSRLGAVFPFLLVLVDLQYEGAECGVNADVEKHLELGKKLLAAGQLADALSQFHAAVDGDPDNYIAYYRRATVFLAMGKSKAALPDLTKVIALKMDFTAARLQRGHLLLKQGKLDEAEDDFKKVLKSNPSEQEEKEAESQLVKADEMQRLRSQALDAFDGADYTAAITFLDKILEVCVWDAELRELRAECFIKEGEPRKAISDLKAASKLKSDNTEAFYKISTLYYQLGDHELSLSEVRECLKLDQDHKRCFAHYKQVKKLNKLIESAEELIRDGRYTDATSKYESVMKTEPSVAEYTVRSKERICHCFSKDEKPVEAIRICSEVLQMEPDNVNALKDRAEAYLIEEMYDEAIQDYEAAQEHNENDQQIREGLEKAQRLLKQSQKRDYYKILGVKRNAKKQEIIKAYRKLALQWHPDNFQNEEEKKKAEKKFIDIAAAKEVLSDPEMRKKFDDGEDPLDAESQQGGGGNPFHRSWNSWQGFNPFSSGGPFRFKFHFN

SEQ ID NO: 426 - protein, 493 aa, Mus musculus
MPPAIGGPVGYTPPDGGWGWAVLVGAFISIGFSYAFPKSITVFFKEIEVIFSATTSEVSWISSIMLAVMYAGGPISSILVNKYGSRPVMIAGGCLSGCGLIAASFCNTVQELYLCIGVIGGLGLAFNLNPALTMIGKYFYKKRPLANGLAMAGSPVFLSTLAPLNQAFFDIFDWRGSFLILGGLLLNCCVAGSLMRPIGPEQVKLEKLKSKESLQEAGKSDANTDLIGGSPKGEKLSVFQTINKFLDLSLFTHRGFLLYLSGNVVMFFGLFTPLVFLSSYGKSKDFSSEKSAFLLSILAFVDMVARPSMGLAANTKWIRPRIQYFFAASVVANGVCHLLAPLSTTYVGFCVYAGVFGFAFGWLSSVLFETLMDLIGPQRFSSAVGLVTIVECCPVLLGPPLLGRLNDMYGDYKYTYWACGVILIIAGIYLFIGMGINYRLLAKEQKAEEKQKREGKEDEASTDVDEKPKETMKAAQSPQQHSSGDPTEEESPV

SEQ ID NO: 427 - protein, 359 aa, Mus musculus
MEPISVSIYTSDNYSEEVGSGDYDSNKEPCFRDENVHFNRIFLPTIYFIIFLTGIVGNGLVILVMGYQKKLRSMTDKYRLHLSVADLLFVITLPFWAVDAMADWYFGKFLCKAVHIIYTVNLYSSVLILAFISLDRYLAIVHATNSQRPRKLLAEKAVYVGVWIPALLLTIPDFIFADVSQGDISQGDDRYICDRLYPDSLWMVVFQFQHIMVGLILPGIVILSCYCIIISKLSHSKGHQKRKALKTTVILILAFFACWLPYYVGISIDSFILLGVIKQGCDFESIVHKWISITEALAFFHCCLNPILYAFLGAKFKSSAQHALNSMSRGSSLKILSKGKRGGHSSVSTESESSSFHSS

SEQ ID NO: 428 - protein, 334 aa, Mus musculus
MNLLLLLAVLCLGTALATPKFDQTFSAEWHQWKSTHRRLYGTNEEEWRRAIWEKNMRMIQLHNGEYSNGQHGFSMEMNAFGDMTNEEFRQVVNGYRHQKHKKGRLFQEPLMLKIPKSVDWREKGCVTPVKNQGQCGSCWAFSASGCLEGQMFLKTGKLISLSEQNLVDCSHAQGNQGCNGGLMDFAFQYIKENGGLDSEESYPYEAKDGSCKYRAEFAVANDTGFVDIPQQEKALMKAVATVGPISVAMDASHPSLQFYSSGIYYEPNCSSKNLDHGVLLVGYGYEGTDSNKNKYWLVKNSWGSEWGMEGYIKIAKDRDNHCGLATAASYPVVN

SEQ ID NO: 429 - protein, 496 aa, Mus musculus
MADESETAVKLPAPSLPLMMEGNGNGHEHCSDCENEEDNSHNRSGLSPANDTGAKKKKKKQKKKKEKGSDMESTQDQPVKMTSLPAERIQEIQKAIELFSVGQGPAKTMEEASKRSYQFWDTQPVPKLGEVVNTHGPVEPDKDNIRQEPYTLPQGFTWDALDLGDRGVLKELYTLLNENYVEDDDNMFRFDYSPEFLLWALRPPGWLPQWHCGVRVVSSRKLVGFISAIPANIHIYDTEKKMVEINFLCVHKKLRSKRVAPVLIREITRRVHLEGIFQAVYTAGVVLPKPVGTCRYWHRSLNPRKLIEVKFSHLSRNMTMQRTMKLYRLPETPKTAGLRPMEKKDIPVVHQLLSRYLKQFHLTPVMNQEEVEHWFYPQENIIDTFVVENANGEVTDFLSFYTLPSTIMNHPTHKSLKAAYSFYNVHTQTPLLDLMSDALVLAKMKGFDVFNALDLMENKTFLEKLKFGIGDGNLQYYLYNWKCPSMGAEKVGLVLQ

SEQ ID NO: 430 - protein, 455 aa, Mus musculus
MWLELILASVLGFVIYWFVSRDKEETLPLEDGWWGPGSKPSAKEDESIRPFKVETSDEEIKDLHQRIDRFRASPPLEGSRFHYGFNSSYLKKVVSFWRNEFDWRKQVEILNQYPHFKTKIEGLDIHFIHVKPPQLPSGRTPKPLLMVHGWPGSFYEFYKIIPLLTDPKTHGLSDEHVFEVICPSIPGYGFSEASSKKGLNSVATARIFYKLMSRLGFQKFYIQGGDWGSLICTNIAQMVPNHVKGLHLNMSFISRNIYSLTPLLGQRFGRFLGYTEKDLELLYPFKEKVFYNIMRESGYLHIQATKPDTVGCALNDSPVGLAAYILEKFSTWTKSEYRELEDGGLERKFSLEDLLTNIMIYWTTGTIVSSQRFYKENLGQGVMVHRHEGMKVFVPTGYSAFPSEILHAPEKWVKVKYPKLISYSYMERGGHFAAFEEPKLLAQDIRKFVSLAELQ

SEQ ID NO: 431 - protein, 655 aa, Mus musculus
MMKFTVVAAALLLLGAVRAEEEDKKEDVGTVVGIDLGTTYSCVGVFKNGRVEIIANDQGNRITPSYVAFTPEGERLIGDAAKNQLTSNPENTVFDAKRLIGRTWNDPSVQQDIKFLPFKVVEKKTKPYIQVDIGGGQTKTFAPEEISAMVLTKMKETAEAYLGKKVTHAVVTVPAYFNDAQRQATKDAGTIAGLNVMRIINEPTAAAIAYGLDKREGEKNILVFDLGGGTFDVSLLTIDNGVFEVVATNGDTHLGGEDFDQRVMEHFIKLYKKKTGKDVRKDNRAVQKLRREVEKAKRALSSQHQARIEIESFFEGEDFSETLTRAKFEELNMDLFRSTMKPVQEVLEDSDLKKSDIDEIVLVGGSTRIPKIQQLVKEFFNGKEPSRGINPDEAVAYGAAVQAGVLSGDQDTGDLVLLDVCPLTLGIETVGGVMTKLIPRNTVVPTKKSQIFSTASDNQPTVTIKVYEGERPLTKDNHLLGTFDLTGIPPAPRGVPQIEVTFEIDVNGIIRVTAEDKGTGNKNKITITNDQNRLTPEEIERMVNDAEKFAEEDKKLKERIDTRNELESYAYSLKNQIGDKEKLGGKLSSEDKETMEKAVEEKIEWLESHQDADIEDFKAKKKELEEIVQPIISKLYGSGGPPPTGEEDTSEKDEL

SEQ ID NO: 432 - protein, 440 aa, Mus musculus
MVPLKLQALFCLLCCLPWVHPFHWQDTSSFDFRPSVMFHKLQSVMSAAGSGHSKIPKGNGSYPVGCTDLMFGYGNESVFVRLYYPAQDQGRLDTVWIPNKEYFLGLSIFLGTPSIVGNILHLLYGSLTTPASWNSPLRTGEKYPLIVFSHGLGAFRTIYSAIGIGLASNGFIVATVEHRDRSASATYFFEDQVAAKVENRSWLYLRKVKQEESESVRKEQVQQRAIECSRALSAILDIEHGDPKENVLGSAFDMKQLKDAIDETKIALMGHSFGGATVLQALSEDQRFRCGVALDPWMYPVNEELYSRTLQPLLFINSAKFQTPKDIAKMKKFYQPDKERKMITIKGSVHQNFDDFTFVTGKIIGNKLTLKGEIDSRVAIDLTNKASMAFLQKHLGLQKDFDQWDPLVEGDDENLIPGSPFDAVTQVPAQQHSPGSQTQN

SEQ ID NO: 433 - protein, 728 aa, Mus musculus
MMWGTKLLPVLLLQHVLLHLLLLHVAIPYAEGQKKRRNTLHEFKKSAKTTLTKEDPLLKIKTKKVNSADECANRCIRNRGFTFTCKAFVFDKSRKRCYWYPFNSMSSGVKKGFGHEFDLYENKDYIRNCIIGKGGSYKGTVSITKSGIKCQPWNSMIPHEHSFLPSSYRGKDLQENYCRNPRGEEGGPWCFTSNPEVRYEVCDIPQCSEVECMTCNGESYRGPMDHTESGKTCQRWDQQTPHRHKFLPERYPDKGFDDNYCRNPDGKPRPWCYTLDPDTTWEYCAIKTCAHSAVNETDVPMETTECIQGQGEGYRGTSNTIWNGIPCQRWDSQYPHKHDITPENFKCKDLRENYCRNPDGAESPWCFTTDPNIRVGYCSQIPKCDVSSGQDCYRGNGKNYMGNLSKTRSGLTCSMWDKNMEDLHRHIFWEPDASKLNKNYCRNPDDDAHGPWCYTGNPLIPWDYCPISRCEGDTTPTIVNLDHPVISCAKTKQLRVVNGIPTQTTVGWMVSLKYRNKHICGGSLIKESWVITARQCFPARNKDLKDYEAWLGIHDVHERGEEKRKQILNISQLVYGPEGSDLVLLKLARPAILDNFVSTIDLPSYGCTIPEKTTCSIYGWGYTGLINADGLLRVAHLYIMGNEKCSQHHQGKVTLNESELCAGAEKIGSGPCEGDYGGPLICEQHKMRMVLGVIVPGRGCAIPNRPVIFVRVAYYAKWIHKVILTYKL

SEQ ID NO: 434 - protein, 557 aa, Mus musculus
MARLGLLALLCTLAALSASLLAAELKSKSCSEVRRLYVSKGFNKNDAPLYEINGDHLKICPQDYTCCSQEMEEKYSLQSKDDFKTVVSEQCNHLQAIFASRYKKFDEFFKELLENAEKSLNDMFVKTYGHLYMQNSELFKDLFVELKRYYVAGNVNLEEMLNDFWARLLERMFRLVNSQYHFTDEYLECVSKYTEQLKPFGDVPRKLKLQVTRAFVAARTFAQGLAVARDVVSKVSVVNPTAQCTHALLKMIYCSHCRGLVTVKPCYNYCSNIMRGCLANQGDLDFEWNNFIDAMLMVAERLEGPFNIESVMDPIDVKISDAIMNMQDNSVQVSQKVFQGCGPPKPLPAGRISRSISESAFSARFRPYHPEQRPTTAAGTSLDRLVTDVKEKLKQAKKFWSSLPSTVCNDERMAAGNENEDDCWNGKGKSRYLFAVTGNGLANQGNNPEVQVDTSKPDILILRQIMALRVMTSKMKNAYNGNDVDFFDISDESSGEGSGSGCEYQQCPSEFEYNATDHSGKSANEKADSAGGAHAETKPYLLAALCILFLAVQGEWR

SEQ ID NO: 435 - protein, 971 aa, Mus musculus
MAFSVVLHPAFLLAVLSLRASRSEVLEEPLPLTPEIHKVSFQLKLQEVNLEWTVPALTHEELNMIFQIEISRLNISNTIWVENYSTTVKREEAVRWNWTSDIPLECVKHFIRIRALVDDTKSLPQSSWGNWSSWKEVNAKVSVEPDKSLIFPKDKVLEEGSNVTICLMYGQNVYNVSCKLQDEPIHGEQLDSHVSLLKLNNVVFLSDTGTNINCQATKGPKRIFGTVLFVSKVLEEPKNVSCETRDFKTLDCSWEPGVDTTLTWRKQRFQNYTLCESFSKRCEVSNYRNSYTWQITEGSQEMYNFTLTAENQLRKRSVNINFNLTHRVHPKAPQDVTLKIIGATKANMTWKVHSHGNNYTLLCQVKLQYGEVIHEHNVSVHMSANYLFSDLDPDTKYKAFVRCASANHFWKWSDWTQKEFSTPETAPSQALDVWRQVWSENGRRIVTLFWKPLLKSQANGKIISYNIVVENEAKPTESEHYCVWAPALSTNLSLDLQPYKIRITTNNSMGASPESLMVLSNDSGHEEVKEKTIKGIKDAFNISWEPVSGDTMGYVVDWCAHSQDQRCDLQWKNLGPNTTSTTITSDDFKPGVRYNFRIFERSVEHKARLVEKQRGYTQELAPLVNPKVEIPYSTPNSFVLRWPDYDSDFQAGFIKGYLVYVKSKEMQCNQPWERTLLPDNSVLCKYDINGSETKTLTVENLQPESLYEFFVTPYTSAGPGPNETFTKVTTPDARSHMLLQIILPMTLCVLLSIIVCYWKSQWVKEKCYPDIPNPYKSSILSLIKSKKNPHLIMNVKDCIPDVLEVINKAEGSKTQCVGSGKLHIEDVPTKPPIVPTEKDSSGPVPCIFFENFTYDQSAFDSGSHGLIPGPLKDTAHQLGLLAPPNKFQNVLKNDYMKPLVESPTEETSLIYVSQLASPMCGDKDTLATEPPVPVHGSEYKRQMVVPGSLASPSLKEDNSLTSTVLLGQGEQ

SEQ ID NO: 436 - protein, 1253 aa, Mus musculus
MAAQVTLEDALSNVDLLEELPLPDQQPCIEPPPSSLLYQPNFNTNFEDRNAFVTGIARYIEQATVHSSMNEMLEEGQEYAVMLYTWRSCSRAIPQVKCNEQPNRVEIYEKTVEVLEPEVTKLMNFMYFQRNAIERFCGEVRRLCHAERRKDFVSEAYLITLGKFINMFGVLDELKNMKCSVKNDHSAYKRAAQFLRKMADPQSIQESQNLSMFLANHNKITQSLQQQLEVISGYEELLADIVNLCVDYYENRMYLTPSEKHMLLKVMGFGLYLMDGSVSNIYKLDAKKRINLSKIDKYFKQLQVVPLFGDMQIELARYIKTSAHYEENKSRWTCASSSSSPQYNICEQMIQIREDHMRFISELARYSNSEVVTGSGRQEAQKTDAEYRKLFDLALQGLQLLSQWSAHAMEVYSWKLVHPTDKYSNKDCPDNAEEYERATRYNYTTEEKFALVEVIAMIKGLQVLMGRMESVFNHAIRHTVYAALQDFSQVTLREPLRQAIKKKKNVIQSVLQAIRKTVCDWETGHEPFNDPALRGEKDPKSGFDIKVPRRAVGPSSTQLYMVRTMLESLIADKSGSKKTLRSSLEGPTILDIEKFHRESFFYTHLINFSETLQQCCDLSQLWFREFFLELTMGRRIQFPIEMSMPWILTDHILETKEASMMEYVLYSLDLYNDSAHYALTKFNKQFLYDEIEAEVNLCFDQFVYKLADQIFAYYKVMAGSLLLDKRLRSECKNQGATIHLPPSNRYETLLKQRHVQLLGRSIDLNRLITQRVSAAMYKSLELAIGRFESEDLTSVVELDGLLEINRMTHKLLSRYLTLDSFDAMFREANHNVSAPYGRITLHVFWELNYDFLPNYCYNGSTNRFVRTVLPFSQEFQRDKQPNAQPQYLHGSKALNLAYSSIYGSYRNFVGPPHFQVICRLLGYQGIAVVMEELLKVVKSLLQGTILQYVKTLMEVMPKICRLPRHEYGSPGILEFFHHQLKDIAEYAELKTVCFQNLREVGNAVLFCLLIEQSLSLEEVCDLLHAAPFQNILPRIHVKEGERVDAKMKRLESKYAPLHLVPLIERLGTPQQIAIAREGHLLTKERLCCGLSMFEVILTRIRTFLDDPIWRGPLPSNGVMHVDECVEFHRLWSAMQFVYCIPVGTHEFTVEQCFGDGLHWAGCMIIVLLGQQRRFAVLDFCYHLLKVQKHDGKDEIIKNVPLKKMVERIRKFQILNDEIITILDKYLKSGDGETTPVEHVRCFQPPIHQSLASS

SEQ ID NO: 437 - protein, 1960 aa, Mus musculus
MAQQAADKYLYVDKNFINNPLAQADWAAKKLVWVPSSKNGFEPASLKEEVGEEAIVELVENGKKVKVNKDDIQKMNPPKFSKVEDMAELTCLNEASVLHNLKERYYSGLIYTYSGLFCVVINPYKNLPIYSEEIVEMYKGKKRHEMPPHIYAITDTAYRSMMQDREDQSILCTGESGAGKTENTKKVIQYLAHVASSHKSKKDQGELERQLLQANPILEAFGNAKTVKNDNSSRFGKFIRINFDVNGYIVGANIETYLLEKSRAIRQAKEERTFHIFYYLLSGAGEHLKTDLLLEPYNKYRFLSNGHVTIPGQQDKDMFQETMEAMRIMGIPEDEQMGLLRVISGVLQLGNIAFKKERNTDQASMPDNTAAQKVSHLLGINVTDFTRGILTPRIKVGRDYVQKAQTKEQADFAIEALAKATYERMFRWLVLRINKALDKTKRQGASFIGILDIAGFEIFDLNSFEQLCINYTNEKLQQLFNHTMFILEQEEYQREGIEWNFIDFGLDLQPCIDLIEKPAGPPGILALLDEECWFPKATDKSFVEKVVQEQGTHPKFQKPKQLKDKADFCIIHYAGKVDYKADEWLMKNMDPLNDNIATLLHQSSDKFVSELWKDVDRIIGLDQVAGMSETALPGAFKTRKGMFRTVGQLYKEQLAKLMATLRNTNPNFVRCIIPNHEKKAGKLDPHLVLDQLRCNGVLEGIRICRQGFPNRVVFQEFRQRYEILTPNSIPKGFMDGKQACVLMIKALELDSNLYRIGQSKVFFRAGVLAHLEEERDLKITDVIIGFQACCRGYLARKAFAKRQQQLTAMKVLQRNCAAYLRLRNWQWWRLFTKVKPLLNSIRHEDELLAKEAELTKVREKHLAAENRLTEMETMQSQLMAEKLQLQEQLQAETELCAEAEELRARLTAKKQELEEICHDLEARVEEEEERCQYLQAEKKKMQQNIQELEEQLEEEESARQKLQLEKVTTEAKLKKLEEDQIIMEDQNCKLAKEKKLLEDRVAEFTTNLMEEEEKSKSLAKLKNKHEAMITDLEERLRREEKQRQELEKTRRKLEGDSTDLSDQIAELQAQIAELKMQLAKKEEELQAALARVEEEAAQKNMALKKIRELETQISELQEDLESERASRNKAEKQKRDLGEELEALKTELEDTLDSTAAQQELRSKREQEVSILKKTLEDEAKTHEAQIQEMRQKHSQAVEELADQLEQTKRVKATLEKAKQTLENERGELANEVKALLQGKGDSEHKRKKVEAQLQELQVKFSEGERVRTELADKVTKLQVELDSVTGLLSQSDSKSSKLTKDFSALESQLQDTQELLQEENRQKLSLSTKLKQMEDEKNSFREQLEEEEEAKRNLEKQIATLHAQVTDMKKKMEDGVGCLETAEEAKRRLQKDLEGLSQRLEEKVAAYDKLEKTKTRLQQELDDLLVDLDHQRQSVSNLEKKQKKFDQLLAEEKTISAKYAEERDRAEAEAREKETKALSLARALEEAMEQKAELERLNKQFRTEMEDLMSSKDDVGKSVHELEKSKRALEQQVEEMKTQLEELEDELQATEDAKLRLEVNLQAMKAQFERDLQGRDEQSEEKKKQLVRQVREMEAELEDERKQRSMAMAARKKLEMDLKDLEAHIDTANKNREEAIKQLRKLQAQMKDCMRELDDTRASREEILAQAKENEKKLKSMEAEMIQLQEELAAAERAKRQAQQERDELADEIANSSGKGALALEEKRRLEARIALLEEELEEEQGNTELINDRLKKANLQIDQINTDLNLERSHAQKNENARQQLERQNKELKAKLQEMESAVKSKYKASIAALEAKIAQLEEQLDNETKERQAASKQVRRTEKKLKDVLLQVEDERRNAEQFKDQADKASTRLKQLKRQLEEAEEEAQRANASRRKLQRELEDATETADAMNREVSSLKNKLRRGDLPFVVTRRIVRKGTGDCSDEEVDGKADGADAKAAE

SEQ ID NO: 438 - protein, 247 aa, Mus musculus
MSCAGEALAPGPAEQQCPVEAGGGRLGSPAHEACNEDNTEKDKRPATSGHTRCGLMRDQSIWPNPSAGELVRTQPERLPQLQTSAQEPGKEETGKIKNGGHTRMSNGNGIPHGAKHVSVENHKISAPVSQKMHRKIQSSLSVNNDISKKSKVNAVFSPKAASSPEDCCVHCILACLFCEFLTLCNIVLGQASCGICTSEACCCCCGDEMGDDCSCPCDMDCGIMDACCESSDCLEICMECCGICFPS

SEQ ID NO: 439 - protein, 256 aa, Mus musculus
MRSRWIWRFLRPDGCGIRWTSTPHGRLSPALRRGFLTTTTKSDYDRRPVDITPLEQRKLTFDTHALVQDLETHGFDKTQAQTIVSVLSTLSNVSLDTIYKEMVTKAQQEITVQQLMAHLDSIRKDMVILEKSEFANLRAENEKMKIELDQVKQQLTNETSRIRADNKLDINLERSRVTDMFTDQEKQLIEATNEFAKKDTQTKSIISETSNKIDTEIASLKTLMESSKLETIRYLAASVFTCLAIALGFYRFWKEN

SEQ ID NO: 440 - protein, 219 aa, Mus musculus
MNRFFGKAKPKAPPPSLTDCIGTVDSRAESIDKKISRLDAELVKYKDQIKKMREGPAKNMVKQKALRVLKQKRMYEQQRDNLAQQSFNMEQANYTIQSLKDTKTTVDAMKLGVKEMKKAYKEVKIDQIEDLQDQLEDMMEDANEIQEALGRSYGTPELDEDDLEAELDALGDELLADEDSSYLDEAASAPAIPEGVPTDTKNKDGVLVDEFGLPQIPAS

SEQ ID NO: 441 - protein, 512 aa, Mus musculus
MSSKPEPKDIHQPNGTGPTPSPCSSDGPGREPLAGTSEFLGPDGVEVVVIESRANAKGIREEDALLENGSQSNESDDVSTDRGPAPPSPLKETSFSIGLQVLFPFLLAGFGTVAAGMVLDIVQHWEVFQKVTEVFILVPALLGLKGNLEMTLASRLSTAANIGQMDTPKELWRMITGNMALIQVQATVVGFLASIAAVVFGWIPDGHFSIPHAFLLCASSVATAFIASLVLGMIMIGVIIGSRKIGINPDNVATPIAASLGDLITLALLSGISWGLYLELKHWRYIYPLVCAFFVALLPVWVVLARRSPATREVLYSGWEPVIIAMAISSVGGLILDKTVSDPNFAGMAVFTPVINGVGGNLVAVQASRISTFLHMNGMPGENSEPTPRRCPSPCTTFFSPDVNSRSARVLFLLVVPGHLVFLYTISCMQGGHTTLTLIFIIFYMTAALLQVLILLYIADWMVHWMWGRGLDPDNFSIPYLTALGDLLGTGLLALSFHVLWLIGDRDTDVGD

SEQ ID NO: 442 - protein, 1230 aa, Mus musculus
MEEDAGAASPAPEPEPEVDPARELEPEAGVSESISRLWTDVMGILDGSLGNIDDLAQQYADYYNTCFSDVCERMEELRKRRVSQDLDVEKPDASPTSLQLRSQIEESLGFCSAVSTPEVERKYPLHKSNSEDGCVGKGDWKKKNKYFWQNFRKNQKGIMRQTSKGEDVGYVASEITMSDEERIQLMMMVKEKMITIEEALARLKEYEAQHRQSSTLDPADWPDGSYPTLDGSSTCNSREQSDDETEDSVKFKRLHKLVNSTRRVRKKLIRVEEMKKPSAEGGEEHVFENSPVQDERSALYSGVHKKPFFYDGSPEKPPEDDADSLTPSPSSSSLDTWGAGRKLVKTFSKGESRGLIKPPKKMGTFFSYPEEEKAQKVSRSLTEGEMKKGLGSLSHGRTCSFGGFDLTNRSLHVGSNNSDPAGKEGDFVYKEVIKSPPAPRISLGKKVRSVKETMRKRMSKKYSSPVSEQDSGLDGMPSSPASGKPDSEHVDKPKLKAGGSVESLRSSLSGQSSMSGQTVSTTDSSTSNRESVKSEDGDDEEPPYRGPFCGRARVHTDFTPSPYDTDSLKLKKGDIIDIISKPPMGTWMGLLNNKVGTFKFIYVDVLNEEEEKPKRPTRRRKKGRPSQPKSVEDLLDRINLKEHMPTFLFNGYEDLDTFKLLEEEDLDELNIRDPEHRAVLLTAVELLQEYDSNSDQSGSQEKLLVDNQGLSGRSPRDSGCYESSENLENAKTHKPSVLSTKSSTESNLKSFTRSQPGNYPTLPLMKSGEVRKQGEEGRLGRGLAPDTAKSCDVPSVTDLSKNRRSLPVSICRSCETLEGPEPVESWPRSHSLDDLQGDADVGKNVPTEMPETCSQNVPEVPQKTSACTSKALPRGRDPTADVMLLTQSKRFSDPPKTMAKKLDGSVVASNLGIAPPQCIPRDFEAQPPVKPGLTRTSLEGLRKGHDHHPLGTKEGVDGEQSAPETRTQSRHPSQPPPVPAKKSRERLANGLHLVPSPEAPILPLKKASPASPVSPSDCPSPREPRPSSGTEPGSPACTRPPPWLAELPESTSLQEHGVKLGPVLSRKVSCVRGVDLEMLTENKLQAEGIDLTEEPYSDKHGRCGIPEALVQRYAEDLEQPERDVATNMDQIRVKLLRKQHRMAIPSGGLTEICRKPLSPGCVASMSDWLISIGLPMYTSTLSDAGFSTLSQVPSLSHSCLQEAGITEERHIRKLITAARLFKLPPSPEAM

SEQ ID NO: 443 - protein, 848 aa, Mus musculus
MAAVGSMRSGSPAFGLGHLLTLAILALASDACKEVVLQVPSELPAEKFVGRVNLMDCLKSADIVHLSDPDFQVLEDGSVYTTSSVVLSSGQRSFTIWLFSTDSQEEREISVHLEGPVEVLNKRPHTEKVLSRAKRRWAPIPCSMLENSLGPFPLFLQQIQSDTAQNYTIYYSIRGPGVDKEPLNLFYVERDTGNLYCTGRVDREQYESFELTAFATTPDGYTPEYPLPLLIKIEDENDNYPIFTQKLYSFTVQENSRIGSIVGEVCATDLDEPDTMHTRLRYSILEQSPSPPMLFTMHPSTGVITTTSAQLDRELIDKYQLLIKVQDMDGQYFGLHTTAKCIITIEDVNDNLPTFTRTTYVTSVEENTVNVEILRLTVQDKDLVNSPNWRANYTILKGNENGNFKIVTDPKTNEGILCVIKPLDYEERQQVTLQIGVVNEAPYTREASSKSPMSTATVTVTVTNQDEGPECIPPMQTVRIQENVPVGTRNDGYKAYDPETRSSSGIRYRKLSDPRGWVTVNEDSGSITIFRALDREAETVRNGIYNITVLALDADGRSCTGTLGIILEDVNDNGPFIPKQTVVICKATMSSAEIVAVDLDDPVNGPPFDFSLESSDSEVQRMWRLTRINDTAARLSYQNDPSFGSYAVPIRVTDRLGLSSVTTLNVLVCDCITESDCTLRSGERTGYADVRLGPWAILAILLGIALLFCILFTLVCSVSRASKQQKILPDDLAQQNLIVSNTEAPGDDKVYSTNGLTTQTMGASGQTAFTTMGTGVKSGGQETIEMVKGGQQTLDSRRGAGYHHHTLDPCRGGHVEVDNYRHTYSEWYNFIQPRLGDETIRGHTLIKN

SEQ ID NO: 444 - protein, 470 aa, Mus musculus
MSTTSKESLESNLRQLKCHFTWNLIAEDESLDEFEDRVFNKDEFQNSEFKATMCNILAYVKHCRGLNEAALQCLGEAEGFIQQQHPDQVEIRSLVTWGNYAWVYYHMGQFSKAQAYLDKVKQVCKKFSSPYRIENPALDCEEGWARLKCTKNQNERVKVCFQKALEKDPKNPEFTSGWAIANYRLDDWPARNYCIDSLEQAIQLSPDNTYVKVLLALKLDAVHKNQAMALVEEALKKDPSAIDTLLRAARFYCKVYDTDRAIQLLRKALEKLPNNAYVHYYMGCCYRSKVHHMLNRREMVFSGDRKKLEELIQLAVNHLRKAEEIKEMLEYSCSFLADLYIIAKKYDEADYYFQKELSKDLPPGPKQLLHLRYGNFQFFQMKRQDKAIYHYMEGVKIKKKTIPQKKMREKLQRIALRRLHEDESDSEALHILAFLQENGGGQQADKDSERGVDSANQVPSASLDEAGAEY

SEQ ID NO: 445 - protein, 671 aa, Mus musculus
MAAAGVVSGKIIYEQEGVYIHSSCGKANDQDSLISGILRVLEKDAEVIVDWRPLDDALDSSSILCAGKDSSSVVEWTQAPKERAHRGSDQQSSYEAEWDMVTTVSFKKKPHTNGDAPGHRNGKSKWSFLFSLADLKSVKQSKEGMGWSYLVFCLKDDVMLPALHFHQGDSKLLIESLEKYVVLCESPQDSRTLLVNCQNKSLSQSFENLLDEPAYGLTQKIKKDPYTATMVGFSKVTNYIFDSLRGSDPSTHQRPPSEMADFLSDAIPGLKINQQEEPGFEVITRIDLGERPVVQRREPVSLEEWNKSLDPEGRLVAVESMKQKIFRGGLSHSLRKQAWKFLLGYFPWDSTKEERTQLQKQKTDEYFRMKLQWKSVSEAQEKRNSRLRDYRSLIEKDVNRTDRTNKFYEGQDNPGLILLHDILMTYCMYDFDLGYVQGMSDLLSPLLYVMENEVDAFWCFASYMDQMHQNFEEQMQGMKTQLIQLSTLLRLLDSGFCSYLESQDSGYLYFCFRWLLIRFKREFSFLDILRLWEVMWTELPCKNFHLLLCCAILESEKQQIMAKHYGFNEILKHINELSMKIDVEDILCKAEAISLQMAQCKELPQAVCEILGLQDNEITTPDSDTDENVGSPCPVSAFPSSTLPILAASEAKDDSPTQTLASPNACRLTPA

SEQ ID NO: 446 - protein, 1363 aa, Mus musculus
MERGAAAAAWMLLLAIAACLAPVSGQECGSGNFRCDNGYCIPASWRCDGTRDCLDDTDEIGCPPRSCGSGFFLCPAEGTCIPSSWVCDQDKDCSDGADEQQNCPGTTCSSQQLTCSNGQCVPIEYRCDHVSDCPDGSDERNCYYPTCDQLTCANGACYNTSQKCDHKVDCRDSSDEANCTTLCSQKEFQCGSGECILRAYVCDHDNDCEDNSDEHNCNYDTCGGHQFTCSNGQCINQNWVCDGDDDCQDSGDEDGCESNQRHHTCYPREWACPGSGRCISMDKVCDGVPDCPEGEDENNATSGRYCGTGLCSILNCEYQCHQTPYGGECFCPPGHIINSNDSRTCIDFDDCQIWGICDQKCESRQGRHQCLCEEGYILERGQHCKSNDSFSAASIIFSNGRDLLVGDLHGRNFRILAESKNRGIVMGVDFHYQKHRVFWTDPMQAKVFSTDINGLNTQEILNVSIDAPENLAVDWINNKLYLVETRVNRIDVVNLEGNQRVTLITENLGHPRGIALDPTVGYLFFSDWGSLSGQPKVERAFMDGSNRKDLVTTKLGWPAGITLDLVSKRVYWVDSRYDYIETVTYDGIQRKTVARGGSLVPHPFGISLFEEHVFFTDWTKMAVMKANKFTDTNPQVYHQSSLTPFGVTVYHALRQPNATNPCGNNNGGCAQICVLSHRTDNGGLGYRCKCEFGFELDADEHHCVAVKNFLLFSSQTAVRGIPFTLSTQEDVMVPVTGSPSFFVGIDFDAQHSTIFYSDLSKNIIYQQKIDGTGKEVITANRLQNVECLSFDWISRNLYWTDGGSKSVTVMKLADKSRRQIISNLNNPRSIVVHPAAGYMFLSDWFRPAKIMRAWSDGSHLMPIVNTSLGWPNGLAIDWSTSRLYWVDAFFDKIEHSNLDGLDRKRLGHVDQMTHPFGLTVFKDNVFLTDWRLGAIIRVRKSDGGDMTVVRRGISSIMHVKAYDADLQTGTNYCSQTTHPNGDCSHFCFPVPNFQRVCGCPYGMKLQRDQMTCEGDPAREPPTQQCGSSSFPCNNGKCVPSIFRCDGVDDCHDNSDEHQCGALNNTCSSSAFTCVHGGQCIPGQWRCDKQNDCLDGSDEQNCPTRSPSSTCPPTSFTCDNHMCIPKEWVCDTDNDCSDGSDEKNCQASGTCHPTQFRCPDHRCISPLYVCDGDKDCVDGSDEAGCVLNCTSSQFKCADGSSCINSRYRCDGVYDCKDNSDEAGCPTRPPGMCHPDEFQCQGDGTCIPNTWECDGHPDCIQGSDEHNGCVPKTCSPSHFLCDNGNCIYNSWVCDGDNDCRDMSDEKDCPTQPFHCPSSQWQCPGYSICVNLSALCDGVFDCPNGTDESPLCSKFPDHSLLDTNLF

SEQ ID NO: 447 - protein, 250 aa, Mus musculus
MPKVVSRSVVCSDTRDREEYDDGEKPLHVYYCLCGQMVLVLDCQLEKLPMRPRDRSRVIDAAKHAHKFCNTEDEETTYLRRPEGIERQYRKKCAKCGLPLFYQSQPKNAPVTFIVDGAVVKFGQGFGKTNIYTQKQEPPKKVMMTKRTKDMGKFSSVTVSTIDEEEEEIEAREVADSYAQNAKVIEKQLERKGMSKRRLQELVAGMLLYPVSREAGRSADRAPFALGISLRTSCAAERVVIPLCNTQDGK

SEQ ID NO: 448 - protein, 780 aa, Mus musculus
MDKFWWHTAWGLCLLQLSLAHPHQQIDLNVTCRYAGVFHVEKNGRYSISRTEAADLCQAFNSTLPTMDQMKLALSKGFETCRYGFIEGNVVIPRIHPNAICAANHTGVYILVTSNTSHYDTYCFNASAPPEEDCTSVTDLPNSFDGPVTITIVNRDGTRYSKKGEYRTHQEDIDASNIIDDDVSSGSTIEKSTPEGYILHTYLPTEQPTGDQDDSFFIRSTLATIASTVHSKSHAAAQKQNNWIWSWFGNSQSTTQTQEPTTSATTALMTTPETPPKRQEAQNWFSWLFQPSESKSHLHTTTKMPGTESNTNPTGWEPNEENEDETDKYPSFSGSGIDDDEDFISSTIATTPRVSARTEDNQDWTQWKPNHSNPEVLLQTTTRMADIDRISTSAHGENWTPEPQPPFNNHEYQDEEETPHATSTTPNSTAEAAATQQETWFQNGWQGKNPPTPSEDSHVTEGTTASAHNNHPSQRITTQSQEDVSWTDFFDPISHPMGQGHQTESKDTDSSHSTTLQPTAAPNTHLVEDLNRTGPLSVTTPQSHSQNFSTLHGEPEEDENHPTTSILPSSTKSGAKDARRGGSLPTDTTTSVEGYTFQYPDTMENGTLFPVTPAKTEVFGETEVTLATDSNVNVDGSLPGDRDSSKDSRGSSRTVTHGSELAGHSSANQDSGVTTTSGPMRRPQIPEWLIILASLLALALILAVCIAVNSRRRCGQKKKLVINGGNGTVEDRKPSELNGEASKSQEMVHLVNKEPSETPDQCMTADETRNLQSVDMKIGV

SEQ ID NO: 449 - protein, 658 aa, Mus musculus
MSQVAAESTAGLDQQFVGLDLKSSDNQNGGGNTESKGRYIPPHLRNRETSKGVCDKDSSGWSCSKDKDAYSSFGSRDSRGKPNYFSDRGSGSRGRFDDHGRNDYDGIGGRDRTGFGKFERSGHSRWSDRSDEDDWSKPLPPSERLEQELFSGGNTGINFEKYDDIPVEATGNNCPPHIENFSDIEMGEIIMGNIELTRYTRPTPVQKHAIPIIKEKRDLMACAQTGSGKTAAFLLPILSQIYTDGPGEALKAMKENGRYGRRKQYPISLVLAPTRELAVQIYEEARKFSYRSRVRPCVVYGGADTVQQIRDLERGCHLLVATPGRLVDMMERGKIGLDFCKYLVLDEADRMLDMGFEPQIRRIVEQDTMPPKGVRHTMMFSATFPKEIQMLARDFLDEYIFLAVGRVGSTSENITQKVVWVEELDKRSFLLDLLNATGKDSLTLVFVETKKGADSLENFLFQERYACTSIHGDRSQKDREEALHQFRSGRKPILVATAVAARGLDISNVKHVINFDLPSDIEEYVHRIGRTGRVGNLGLATSFFNERNLNITKDLLDLLVEAKQEVPSWLESMAYEHHYKGSSRGRSKSRFSGGFGARDYRQSSGSANAGFNSNRANSSRSSGSSHNRGFGGGGYGGFYNNDGYGGNYNSQAVDWWGN

SEQ ID NO: 450 - protein, 481 aa, Mus musculus
MLFWHTQPEHYNQHNSGSYLRDVLALPIFKQEEPQLSPENGARLPPLQYVLCAATSPAVRLHEETLTYLNQGQSYEIRLLENRKLGDFQDLNTKYVKSIIRVVFHDRRLQYTEYQQLEGWRWSRPGDRILDIDIPLSVGILDPRASPTQLNAVEFLWDPSKRASAFIQVHCISTEFTPRKHGGEKGVPFRVQIDAFKQNEKWGLLGASTLLPACQIKGFKAQGELIGNKKTDREKMEKRTAQEKEKYQPSYETTILTECSPWPDVPYQANTPPSPSYNGSPNSFGLREGTSSPIHPVEPLPLGSDHLLPSASIQDAQQWLHRNRFSQFCWLFASFSGADLLKMSRDDLVQVCGPADGIRLFNAIKGRNVRPKMTIYVCQELEQNQLPLPQKQDDSGDNSLCVYHAIFLEELTTLELTEKIASLYSIPPQHIHRVYRQGPAGIHVVVSNEMVQNFQDESCFILSTLKAESSDGYHIILKCGL

SEQ ID NO: 451 - protein, 305 aa, Mus musculus
MTGKEENMQSANRVLRISQLDALELNKALEQLVWSQFTQCFHGFKPGLLARFEPEVKAFLWLFLWRFTIYSKNATVGQSVLNIQYKNDSSLNLIYQPPSKTQKLWYAVCTIGGKWLEERCYDLFRNRHLASFGKAKQFMNFLVGLLKLGELINFLIFLQKGKFATLTERLLGIHSVFCKPQNMREVGFEYMNRELLWHGFAEFLIFLLPLINIQKLKAKLSSWCIPLTGAAGHDSTLGSSGKECALCGEWPTMPHTIGCEHVFCYYCVKSSFLFDIYFTCPKCGTEVHSVQPLKSGIEMSEVNAL

SEQ ID NO: 452 - protein, 298 aa, Mus musculus
MRDRTHELRQGDNISDDEDEVRVALVVHSGAARLGSPDDEFFQKVQTIRQTMAKLESKVRELEKQQVTILATPLPEESMKQGLQNLREEIKQLGREVRAQLKAIEPQKEEADENYNSVNTRMKKTQHGVLSQQFVELINKCNSMQSEYREKNVERIRRQLKITNAGMVSDEELEQMLDSGQSEVFVSNILKDTQVTRQALNEISARHSEIQQLERSIRELHEIFTFLATEVEMQGEMINRIEKNILSSADYVERGQEHVKIALENQKKARKKKVMIAICVSVTVLILAVIIGITITVG

SEQ ID NO: 453 - protein, 310 aa, Mus musculus
MGKRRCVPPLEPKLAAGCCGVKKPKLSGSGTHSHGNQSTTVPGSSSGPLQNHQHVDNSSGRENVSDLTLGPGNSPITRMNTASGALSPLPRPNGTANSTKNLVVTAEMCCYCFDVLYCHLYGFPQPRLPRFTNDPYPLFVTWKTGRDKRLRGCIGTFSAMNLHSGLREYTLTSALKDSRFPPLTREELPKLFCSVSLLTNFEDASDYLDWEVGVHGIRIEFINEKGIKRTATYLPEVAKEQDWDQIQTIDSLLRKGGFKAPITSEFRKSIKLTRYRSEKVTISYAEYIASRQHCFQNGTLHAPPLYNHYS

SEQ ID NO: 454 - protein, 436 aa, Mus musculus
  MOD_RES (213)..(213): Variable amino acid
MTMGLRAPHWVAVGLLTWAALGLLVAGHEGHGDLHKDVEEDFHGHSHGHSHEDFHHGHSHGHSHEDFHHGHGHTHESIWHGHAHSHDHGHSREELHHGHSHGHSHDSLHHGGHGHAHREHSHGTSREAGAPGIKHHLDTVTLWAYALGATVLISAAPFFVLFLIPVESNSPRHRSLLQILLSFASGGLLGDAFLHLIPHALEPHSHHAPEQPXHGHSHSGQGPILSVGLWVLSGIVAFLVVEKFVRHVKGGHGHSHGHGDRHAHGDSHTHGDRHECSSKEKPSTEEEKEVGGLRKRRGGNTGPRDGPVKPQSPEEEKAGSDLRVSGYLNLAADLAHNFTDGLAIGASFRGGRGLGILTTMTVLLHELPHEVGDFAILVQSGCSKKQAMRLQLVTAIGALAGTRVPFSPREGQWTVTWQVVQVLAGSCHSLQADLST

SEQ ID NO: 455 - protein, 371 aa, Mus musculus
MNVKGKVILLMLIVSTVVVVFWEYVNSPDGSFLWIYHTKIPEVGENRWQKDWWFPSWFKNGTHSYQEDNVEGRREKGRNGDRIEEPQLWDWFNPKNRPDVLTVTPWKAPIVWEGTYDTALLEKYYATQKLTVGLTVFAVGKYIEHYLEDFLESADMYFMVGHRVIFYVMIDDTSRMPVVHLNPLHSLQVFEIRSEKRWQDISMMRMKTIGEHILAHIQHEVDFLFCMDVDQVFQDNFGVETLGQLVAQLQAWWYKASPEKFTYERRELSAAYIPFGEGDFYYHAAIFGGTPTHILNLTRECFKGILQDKKHDIEAQWHDESHLNKYFLFNKPTKILSPEYCWDYQIGLPSDIKSVKVAWQTKEYNLVRNNV

SEQ ID NO: 456 - protein, 855 aa, Mus musculus
MGSLFRSESMCLAQLFLQSGTAYECLSALGEKGLVQFRDLNQNVSSFQRKFVGEVKRCEELERILVYLVQEITRADIPLPEGEASPPAPPLKHVLEMQEQLQKLEVELREVTKNKEKLRKNLLELVEYTHMLRVTKTFLKRNVEFEPTYEEFPALENDSLLDYSCMQRLGAKLGFVSGLIQQGRVEAFERMLWRACKGYTIVTYAELDECLEDPETGEVIKWYVFLISFWGEQIGHKVKKICDCYHCHIYPYPNTAEERREIQEGLNTRIQDLYTVLHKTEDYLRQVLCKAAESVCSRVVQVRKMKAIYHMLNMCSFDVTNKCLIAEVWCPEVDLPGLRRALEEGSRESGATIPSFMNTIPTKETPPTLIRTNKFTEGFQNIVDAYGVGSYREVNPALFTIITFPFLFAVMFGDFGHGFVMFLFALLLVLNENHPRLSQSQEILRMFFDGRYILLLMGLFSVYTGLIYNDCFSKSVNLFGSGWNVCAMYSSSHSPEEQRKMVLWNDSTIRHSRTLQLDPNIPGVFRGPYPFGIDPIWNLATNRLTFLNSFKMKMSVILGIFHMTFGVVLGIFNHLHFRKKFNVYLVSVPEILFMLCIFGYLIFMIIYKWLAYSAETSREAPSILIEFINMFLFPTSKTHGLYPGQAHVQRVLVALTVLAVPVLFLGKPLFLLWLHNGRNCFGMSRSGYTLVRKDSEEEVSLLGNQDIEEGNSRMEEGCREVTCEEFNFGEILMTQAIHSIEYCLGCISNTASYLRLWALSLAHAQLSDVLWAMLMRVGLRVDTTYGVLLLPVMAFFAVLTIFILLVMEGLSAFLHAIRLHWVEFQNKFYVGAGTKFVPFSFSLLSSKFSNDDSIA

SEQ ID NO: 457 - protein, 472 aa, Mus musculus
MAGGEAGVTLGQPHLSRQDLATLDVTKLTPLSREIISRQATINIGTIGHVAHGKSTVVKAISGVHTVRFKNELERNITIKLGYANAKIYKLDDSSCPRPECYRSCGSSTPDEFPSDIPGTKGNFRLVRHVSFVDCPGHDILMATMLNGAAVMDAALLLIAGNESCPQPQTSEHLAAIEIMKLKHILILQNKIDLVKESQAKEQYEQILAFVQGTVAEGAPIIPISAQLKYNIEVVCEYIVKKIPVPLRDFTSEPRLIVIRSFDVNKPGCEVDDLKGGVAGGSILKGVLKVGQEIEVRPGIVSKDGEGKLMCKPIFSKIVSLFAEHNDLQYAAPGGLIGVGTKIDPTLCRADRMVGQVLGAVGALPEIFTELEISYFLLRRLLGVRTEGDKKAAKVQKLSKNEVLMVNIGSLSTGGRVSAVKADLGKIVLTNPVCTEVGEKIALSRRVEKHWRLIGWGQIRRGVTIKPTIDDE

SEQ ID NO: 458 - protein, 327 aa, Mus musculus
MLWIWAVLPLVLAGSQLRVHTQGTNSISESLKLRRRVHETDKNCSEGLYQGGPFCCQPCQPGKKKVEDCKMNGGTPTCAPCTEGKEYMDKNHYADKCRRCTLCDEEHGLEVETNCTLTQNTKCKCKPDFYCDSPGCEHCVRCASCEHGTLEPCTATSNTNCRKQSPRNRLWLLTILVLLIPLVFIYRKYRKRKCWKRRQDDPESRTSSRETIPMNASNLSLSKYIPRIAEDMTIQEAKKFARENNIKEGKIDEIMHDSIQDTAEQKVQLLLCWYQSHGKSDAYQDLIKGLKKAECRRTLDKFQDMVQKDLGKSTPDTGNENEGQCLE

SEQ ID NO: 459 - protein, 589 aa, Mus musculus
MASEIHMSEPMCLIENTEAQLVINQEALRILSAITQPVVVVAIVGLYRTGKSYLMNKLAGKRTGFSLGSTVQSHTKGIWMWCVPHPKKAGQTLVLLDTEGLEDVEKGDNQNDCWIFALAVLLSSTFIYNSIGTINQQAMDQLHYVTELTDLIKSKSSPDQSGVDDSANFVGFFPTFVWTLRDFSLELEVNGKPVTSDEYLEHSLTLKKGADKKTKSFNEPRLCIRKFFPKRKCFIFDRPAQRKQLSKLETLREEELCGEFVEQVAEFTSYILSYSSVKTLCGGIIVNGPRLKSLVQTYVGAISNGSLPCMESAVLTLAQIENSAAVQKAITHYEEQMNQKIQMPTETLQELLDLHRPIESEAIEVFLKNSFKDVDQKFQTELGNLLVAKRDAFIKKNMDVSSARCSDLLEDIFGPLEEEVKLGTFSKPGGYYLFLQMRQELEKKYNQAPGKGLQAEAMLKNYFDSKADVVETLLQTDQSLTEAAKEVEEERTKAEAAEAANRELEKKQKEFELMMQQKEKSYQEHVKKLTEKMKDEQKQLLAEQENIIAAKLREQEKFLKEGFENESKKLIREIDTLKQNKSSGKCTIL

SEQ ID NO: 460 - protein, 675 aa, Mus musculus
MRVLSARFRVLLACLALVIPVSETNFLSKERASQVLVRKRRANTLFEETMKGNLERECIEELCNKEEAREVFENNPETDYFYPKYLGCLGAFRVGSFHAARQSANAYPDLRSCVKAISDQCDPIPCNEDGYLACQDGQAAFTCFCKPGWQGDRCQYDVNECKDPSNVNGGCSQICDNTPGSYHCSCKRGFAMLPNKKDCKDLDECALKPSVCGTAVCKNIPGDFECECPDGYRYDPSSKSCKDVDECSENMCAQLCVNFPGGYSCYCDGKKGFKLAQDQKSCEGIPVCLSLDLDKNYELLYLAEQFAGVVLYLKFRLPDITRFSAEFDFRTYDSEGIILYAESLDHSNWLLIALRDGKIEVQFKNEFSTQITTGGNVINNGIWNMVSVEELDDSVSIKIAKEAVMNINKLGSLFKPTDGFLDTKIYFAGLPRKVESALIKPINPRLDGCIRGWNLMKQGALGAKEIIEGKQNKHCFLNVEKGSYYPGSGIAQFSIDYNNVTNAEGWQMNVTLNIRPSTGTGVMLALVSGGTVPFALSLVDSRSGTSQDIVVFVENSVVARLEAVSLCSDQQSQLKCNVNRNGLELWTPLRKDVIYSKDLQRQLAVLDKAMKRTVATYLGGIPDISFSATPVNAFYSGCMEVNINGVQLDLDEAISKHKDIRAHSCPSVRKIQKNF

SEQ ID NO: 461 - protein, 795 aa, Mus musculus
MAVPGSLAECGYIRTVLGQQILGHLDSSSLALPSEARLRLAGSSGRGDPAARSQRIQEQVQQTLARRGRSSAVSGNLHRTSSVPEYVYKLHVVENDFVGRQSPVTRDYDMLKAGMTATYGSRWGRAAAQYSSQKSVEERSWRQPLRRLEISPDSSPERAHYGHSEYQYAWRSHVVPGGRLTLPRYARSEILGLRQAGTARRPPGCGSFSDAVFDNGPLKPTMPTHPPGTSHSAGSLLEETTVRVSQARLQSTQSRTARSSWPRSSVRSSLREPGRMLTTAGQAAVGSGDAHGDRSVFADAQLGNADIEMTLERAVNMLDADHVPVSKISAAATFIQHESFQKSEARKRVNQLRGIPKLLQLLKLQNEDVQRAACGALRNLVFEDNDNKLEVAELNGVPRLLQVLKQTRDLETKKQITGLLWNLSSSDKLKHLMITEALLTLTESVIIPFSGWPEGDYPKANGLLDFDIFYNVTGCLRNMSSAGPDGRKMMRRCDGLIDSLVHYVRGTIADYQPDDKATENCVCILHNLSYQLEAELPEKYSQSIYMQNRNIQTNSNKSIGCFGSRSRKLKEQYQDLQMPEERSNPHGIEWLWHSIVIRMYLSLIAKSTRNYTQEASLGALQNLTAGGGPIPTLVARMVVQKENGLQHTRKMLHVGDPSVKKTAVSLLRNLSRNLSLQNEIAKETLPDLVSIIPDTVPSTDLLIETTASACYTLNNLMQNSYQNARDLLNTGGLQKIMTISIGEGYAPNKASKAASVLLYSLWAHTELHHAYKKAQFKKTDFVNSRTAKAYHSLKD

SEQ ID NO: 462 - protein, 937 aa, Mus musculus
MGSWVRTICGRLKQRLRLDVGREICRQYPLFCFLLLCLSVASLLLNRYLHVLMIFWSFVAGVVTFYCSLGPDSLLPNIFFTIKYKPKQLGLQELFPQGHSCAVCGKVKCKRHRPSLLLENYQPWLDLKVSSKVDASLSEVLELVLENFVYPWYRDVTDDESFVDELRITLRFFASVLVRRIHKVDIPSIITKKLLKAAMKHIEVIVKARQKVKNTEYLQQAALEEYGPELHVALRSRRDELQYLRKLTELLFPYILPPKATDCRSLTLLIREILSGSVLLPSLDFLADPDTVNHLLIIFIDDSPPEKATEPASPLVPFLQKFAEPRNKKPSVLKLELKQIREQQDLLFRFMNFLKQEGAVHVLQFCLTVEEFNDRILRPELSNDEMLSLHEELQKIYKTYCLDESIDKIRFDPFIVEEIQRIAEGPYIDVVKLQTMRCLFEAYEHVLSLLENVFTPMFCHSDEYFRQLLRGAESPTRNSKFNRSTQKRGESFGISRIGSKIKGVFKSTTMEGAVLPNYGVAEGEDDFIEEGIVVMEDDSPVEAVSTPNTPRNLAAWKISIPYVDFFEDPSSERKEKKERIPVFCIDVERNDRRAVGHEPEHWSVYRRYLEFYVLESKLTEFHGTFPDAQLPSKRIIGPKNYEFLKSKREEFQEYLQKLVQHPELSNSQLLADFLSPNGGETQFLDKILPDVNLGKIIKSVPGKLMKEKGQHLEPFIMSFINSCESPKPKPSRPELTILSPTSENNKKLFNDLFKNNANRAENTERKQNQNYFMEVMTVDGVYDYLMYVGRVVFQVPDWLHHLLMGTRILFKNTLEMYTDYYLQCKLEQLFQEHRLVSLITLLRDAIFCENTEPRSLQDKQKGAKQTFEEMMNYIPDLIVKCIGEETKYESIRLLFDGLQQPVLNKQLTYVLLDIVIQELFPELNKVQKEATSMTSWM

SEQ ID NO: 463 - protein, 1473 aa, Mus musculus
MGKRWLPSLALLPLPPPLLLLLLLLLPTNASAPQKPIYMVMVPSLLHAGTPEKGCLLFNHLNETVTVKVSMESVRGNQSLFTDLVVDKDLFHCASFIVPQSSSNEVMFLTVQVKGPTHEFRRRSTVLIKTKESLVFAQTDKPIYKPGQMVRFRVVSLDENFHPLNELIPLLYIQDSKKNRIAQWQNFRLEGGLKQLSFPLSSEPTQGSYKVVIRTESGRTVEHPFSVKEFVLPKFEVKVAVPETITILEEEMNVSVCGIYTYGKPVPGHVTVNICRKYSNPSSCFGEESLAFCEKFSQQLDGRGCFSQLVKTKSFQLKRQEYEMQLDVNAKIQEEGTGVEETGKGLTKITRTITKLSFVNVDTHFGQGIPFVGQVLLVDGRGTPIPYEMIFIGADEANQNINTTTDKNGLARFSINTDDIMGTSLTVRAKYKDSNVCYGFRWLTEENVEAWRTANAVFSPSRSFVHLESLPYKLRCEQTLAVQAHYILNDEAVLERKELVFYYLMMAKGGIVRAGTHVLPVTQGHKKGHFSILISMETDLAPVARLVLYTILPNGEVVGDTVKYEIEKCLANKVDLVFHPNIGLPATRAFLSVMASPQSLCGLRAVDQSVLLTKPEAELSASLVYDLLPVKDLTGFPKGVNQQEEDTNGCLKQNDTYIRNPVLPRQNTNEEDMYGFLKDMGLKVFTNLNIRKPKVCERLGVNKIPAAYHLVSQGHMDAFLESSESPTETTRSYFPETWIWDLVIVDSTGVAEMEVTVPDTITEWKAGAFCLSNDTGLGLSPVIDFQAFQPFFVDLTMPYSVIRGEAFTLKATVLNYLQTCIRVGVQLEASPDFLATPEEKEQKSHCICMNERHTMSWAVIPKSLGNVNFTVSAEALDSKELCRNEVPVVPERGKKDTIIKSLLVEPEGLENEVTFNSLLCPTGAEVSEQISLKLPSDVVEESARASVTVLGDILGSAMQNTQDLLKMPYGCGEQNMVLFAPNIYVLDYLNETEQLTQEIKTKAITYLNTGYQRQLNYKHRDGSYSTFGDKPGRSHANTWLTAFVLKSFAQARRYIFIDESHITQALTWLSQQQKDNGCFRSSGSLLNNAMKGGVEDEVTLSAYITIALLEMSLPVTHPVVRNALFCLDTAWKSARRGASGNHVYTKALLAYAFALAGNQDTKKEILKSLDEEAVKEDNSVHWTRAQKPRVPADLWYQPQAPSAEVEMTAYVLLAYLTTELVPTREDLTAAMLIVKWLTKQQNSHGGFSSTQDTVVALHALSKYGAATFTRAKKAAHVTIQSSGAFYTKFQVNNDNQLLLQRVTLPTVPGDYTAKVAGEGCVYLQTSLKYSVLPREKEFPFALVVQTLPGTCEDLKAHTTFQISLNISYIGSRSDSNMAIADVKMVSGFIPLKPTVKMLERSVHVSRTEVSNNHVLIYLDKVSNQMLTLFFMVQQDIPVRDLKPAIVKVYDYYEKDEFAVAKYSAPCSAGYGNA

SEQ ID NO: 464 - protein, 450 aa, Mus musculus
MPSRLLHTLASLHSISAKAHQCQRLTWLTLRPLRKSESTTCHNGLTIQQHLHSFFPSITADSLNKPEILEMSRITSDTSRLFPLNAVHWLDGKEHWPSMHPFGTHRSMTHKPNLLCSKWFIKAVKRHHSSVSNEALVPKQDLPQIKRPLKASRTRQPSRTNLPDLSVNEDLMQCTAFATADEYHLGSLSQELVSCGYVEVTSLPRDAANILVMGVESSAKEGDPGTIFLFREGAAVFWNVKEKTMKHVMQVLERHETQPYEVALVHWENEELNYIKTEGQSKLHRGEIKLNSELDLDDAILEKFAFSNALCLSVKLAIWEATLDKFIESIQSIPEALKAGKKVKLSHKEVMQKMGELFALRHRINLSSDFLITPDFYWDRANLEELYDKTCQFLSITRRVKVMNEKLQHCMELTDLMRNHLNEKRALRLEWMIVILITIEVMFELGRVFF

SEQ ID NO: 465 - protein, 135 aa, Mus musculus
MPVDFNGYWKMLSNENFEEYLRALDVNVALRKIANLLKPDKEIVQDGDHMIIRTLSTFRNYIMDFQVGKEFEEDLTGIDDRKCMTTVSWDGDKLQCVQKGEKEGRGWTQWIEGDELHLEMRAEGVICKQVFKKVH

SEQ ID NO: 466 - protein, 1913 aa, Mus musculus
MIEDKGPRVTDYFVVAGLTDTSTLLDQEINRTDTNSIGPKAPITDIAVIIKSAGETVPEGYTCVEATPSALQANLNYGSLKSPELFLCYRRGRDKPPLTDIGVLYEGKERLMPGCEVIQATPYGRCANVNNSSTTSQRIFITYRRAPPVRSQNSLAVTDICVIITSKGETPPHTFCKVDKNLNCGMWGSNVFLCYKKSVPASNAIAYKAGLIFRYPEEDYESFPLSPSVPLFCLPMGATIECWDPQIKYPLPVFSTFVLTGSSAEKVYGAAIQFYEPYSQERLTEKQLTQLGLLTLVEKRVVSKPINSNKCICLLSHWPFFEAFKNFLMFIYKVSVSGPHPLPIENGANFSSLLMNLGPENCATLLLLVLLESKILLHSLRPAVLTGVAEAVVAMIFPFQWQCPYIPLCPLSLAGVLSAPLPFIVGVDSRYFDLHDPPQDVVCIDLDTNTLYVADERKNINWKQLPKRPCKSLLGTLRRLYQQLCSVHRKPQESSAIEMTPIEADYSWQKKMTQLEMEIQETFLRFMASILKGYRSYLRPITEAPSNKATAADSLFDRQGFLKSRDRAYTKFYTLLSKTQIFIRFIEECSFVSDKDTGLAFFDDCIEKLFPDKGVERTEKVDLDSAEDTRLIELDDSQRSEHTVFIMPPEPPPDDGNNLSPQYSYTYFPRLDLKLFDSPQKLKLCFNRHPPGSSITNSPALMAKRTKQEIKTAHKLAKRCYTNPPQWAKYLFSHCYSLWFICLPAYVRVSHPKVRALQQAHDVLVKMRKTDVDPLDEVCYRVVMQLCGLWVNPVLAVRVLFEMKTARIKPNAITYGYYNKVVLESPWPSSTRSGIFLWTKVRNVVHGLAQFRQPLKKTGQKSQVFSISAPQNAACGSDGDTVSHGSVDSSNDANNGEHTVFVRDLISLDSIDNHSSTGGQSDQGYGSKDELVKEGADGHAPEEHTPPELTTTELHIEEECDISAIVSKHLQPTPEPQSPTEPPAWGSSIVKVPSGLFDTNNRTSTGSTSTVLFSTQAPVEDAVFSEVTNFKKNGDRGEKKQKHFPERSCSFSSESRAGMLLKKSSLDLNSSEMAIMMGADAKILTAALTCPKTSPPHVTRTHSFENVNCHLADSRTRMSEGTRDSEHRSSPVLEMLEESQELLEPVVGDNVAETAAEMTCNSLQSNSHSDQSRDTQAGAQDPVNKRSSSYATRKAIEREDVETGLDPLSLLATECVEKTSDSEDKLFSPVISRNLADEIESYMNLKSPLGSKSCSMELHGEGNQEPGSPAVFAHPLERSSSLPSDRGPPARDSTETEKSSPAVSSSKTLTGRFKPQSPYRAYKDRSTSLSALVRSSPNSSLGSVVNSLSGLKLDNILSGPKIDVLKSSMKQAATVASKMWVAVASAYSYSDDEEETNKDYSFPAGLEDHHIVGETLSPNTSVSGLVPSELTQSNTSLGSSSSSGDVGKLQCPAGEVPFSRNIKGQDFEKSDHGSSQNTSMSSIYQNCAMEVLMSSCSQCRACGALVYDEEIMAGWTADDSNLNTTCPFCKSNFLPLLNVEFKDLRGSASFFLKPSTSGDSLQSGSIPSASEPSEHKPTSSSAEPDLISFMDFSKHSETITEEASYTVESSDEIKKTNGDVQSVKMSSVPNSLSKRNVSLTRSHSVGGPLQNIDFSQRPFHGVSTVSLPSSLQEDVDHLGKRPSPPPVSVPYLSPLVLRKELESLLENEGDQVIHTSSFINQHPIIFWNLVWYFRRLDLPSNLPGLILTSEHCNGGVQLPLSSLSQDSKLVYIQLLWDNINLHQEPGEPLYVSWRNLNSEKKPSLLSEQQQAASALVETIRQSIQQNDVLKPINLLSQQMKPGTKRQRSLYREILFLSLVSLGRENIDIEAFDNEYGLAYRSLPSESLERLQRIDAPPSISVEWCRKCFGAPLI

SEQ ID NO: 467 - protein, 1263 aa, Mus musculus
MFSLNHFLPDSWFSITENRVCQDLGPHAPRARTLWRRESLASWGRTGWSAIGTVPRGGASRALGPALAALGAGRRPGNPGARRSASRFRGSAVTCTAGATPGGGRSLGARGGAPGPRSVGATPRSCCLGGRLDPKRPARAAEPRGGCELHGGARARLGKMPRPELPLPEGWEEARDFDGKVYYIDHRNRTTSWIDPRDRYTKPLTFADCISDELPLGWEEAYDPQVGDYFIDHNTKTTQIEDPRVQWRREQEHMLKDYLVVAQEALSAQKEIYQVKQQRLELAQQEYQQLHAVWEHKLGSQVSLVSGSSSSSKYDPEILKAEIATAKSRVNKLKREMVHLQHELQFKERGFQTLKKIDERMSDAQGGYKLDEAQAVLRETKAIKKAITCGEKEKQDLIKSLAMLKDGFRTDRGSHSDLWSSSSSLESSSFPMPKQFLDVSSQTDISGSFSTSSNNQLAEKVRLRLRYEEAKRRIANLKIQLAKLDSEAWPGVLDSERDRLILINEKEELLKEMRFISPRKWTQGEVEQLEMARRRLEKDLQAARDTQSKALTERLKLNSKRNQLVRELEEATRQVATLHSQLKSLSSSMQSLSSGSSPGSLTSSRGSLAASSLDSSTSASFTDLYYDPFEQLDSELQSKVELLFLEGATGFRPSGCITTIHEDEVAKTQKAEGGSRLQALRSLSGTPRSMTSLSPRSSLSSPSPPCSPLITDPLLTGDAFLAPLEFEDTELSTTLCELNLGGSGTQERYRLEEPGPEGKPLGQAASVAPGCGLKVACVSAAVSDESVAGDSGVYEASAQRPGTSEAAAFDSDESEAVGATRVQIALKYDEKNKQFAILIIQLSHLSALSLQQDQKVNIRVAILPCSESSTCLFRTRPLDSANTLVFNEAFWVSISYPALHQKTLRVDVCTTDRSHTEECLGGAQISLAEVCRSGERSTRWYNLLSYKYLKKQCREPQPTEAPGPDHVDAVSALLEQTAVELEKRQEGRSSSQTLEGSWTYEEEASENEAVAEEEEEGEEDVFTEKVSPEAEECPALKVDRETNTDSVAPSPTVVRPKDRRVGAPSTGPFLRGNTIIRSKTFSPGPQSQYVCRLNRSDSDSSTLSKKPPFVRNSLERRSVRMKRPSSVKSLRTERLIRTSLDLELDLQATRTWHSQLTQEISVLKELKEHLEQAKNHGEKELPQWLREDERFRLLLRMLEKKVDRGEHKSELQADKMMRAAAKDVHRLRGQSCKEPPEVQSFREKMAFFTRPRMNIPALSADDV

SEQ ID NO: 468 - protein, 620 aa, Mus musculus
MAAATPTETPAPEGSGLGMDARLDQETAQWLRWDQNPLTSESVKQLIAGGNKEELRKCFGARMEFGTAGLRAPMGAGISRMNDLTIIQTTQGFCRYLEKQFSDLKQRGVVISFDARAHPASGGSSRRFARLAATAFITQGVPVYLFSDITPTPFVPYTVSHLKLCAGIMITASHNPKQDNGYKVYWDNGAQIISPHDRGISQAIEENLEPWPQAWEESLVDSSPLLHNPSASIGNDYFEDLKKYCFHRTVNKESKVKFVHTSVHGVGHEFVQLAFKAFDLAPPEAVPQQKDPDPEFPTVKYPNPEEGKGVLTLSFALADKIKAKIVLANDPDADRLAVAEKQDSGEWRVFSGNELGALLGWWLFTSWKEKNQDQSNLKDTYMLSSTVSSKILRAIALKEGFHFEETLTGFKWMGNRAQQLGDQGKTVLFAFEEAIGYMCCPFVLDKDGVSAAVICAELASFLATKNLSLSQQLNAIYVEYGYHITTASYFICHDQGTIQNLFGNLRNYDGKNNYPKMCGKFEISAIRDLTTGYDDSQPDKKAVLPTSKSSQMITFTFANGGVATMRTSGTEPKIKYYAELCAPPGNSDPEHLKKELDELVGAIEEHFFQPQKYNLQPKAE

SEQ ID NO: 469 - protein, 284 aa, Mus musculus
MVPIPAGVFTMGTDDPQIRQDGEAPARRVTVDGFYMDAYEVSNADFEKFVNSTGYLTEAEKFGDSFVFEGMLSEQVKTHIHQAVAAAPWWLPVKGANWRHPEGPDSSILHRSNHPVLHVSWNDAVAYCTWAGKRLPTEAEWEYSCRGGLQNRLFPWGNKLQPKGQHYANIWQGKFPVSNTGEDGFQGTAPVDAFPPNGYGLYNIVGNVWEWTSDWWTVHHSVEETFNPKGPTSGKDRVKKGGSYMCHKSYCYRYRCAARSQNTPDSSASNLGFRCAADHLPTAD

SEQ ID NO: 470 - protein, 385 aa, Mus musculus
MGQPYAWRLLSRVSSFRRASVILQHLRMSMHTEAAEVLLERRGCGGVITLNRPKFLNALSLNMIRQIYPQLKTWEQDPDTFLIIIKGAGGKAFCAGGDIKALSEAKKARQNLTQDLFREEYILNNAIASCQKPYVALIDGITMGGGVGLSVHGQFRVATERSLFAMPETGIGLFPDVGGGYFLPRLQGKLGYFLALTGYRLKGRDVHRAGIATHFVDSEKLRVLEEELLALKSPSAEDVAGVLESYHAKSKMDQDKSIIFEEHMDKINSCFSANTVEQIIENLRQDGSPFAIEQMKVINKMSPTSLKITLRQLMEGSSKTLQEVLIMEYRITQACMEGHDFHEGVRAVLIDKDQTPKWKPANLKDVTDEDLNSYFKSLGSSDLKF

SEQ ID NO: 471 - protein, 172 aa, Mus musculus
MASNFKKTTMASSAQRKRMSPKPELTEDQKQEIREAFDLFDADGTGTIDIKELKVAMRALGFEPKKEEIKKMISEIDKEGTGKMNFSDFLTVMTQKMSEKDTKEEILKAFKLFDDDETGKISFKNLKRVAKELGENLTDEELQEMIDEADRDGDGEVNEQEFLRIMKKTSLY

SEQ ID NO: 472 - protein, 813 aa, Mus musculus
MAEAGGAGSPALPPAPPHGSPRTLATAAGSSASCGPATAVAAAGTAEGPGGGGSARIAVKKAQLRSAPRAKKLEKLGVYSACKAEESCKCNGWKNPNPSPTPPRGDLQQIIVSLTESCRSCSHALAAHVSHLENVSEEEMDRLLGIVLDVEYLFTCVHKEEDADTKQVYFYLFKLLRKSILQRGKPVVEGSLEKKPPFEKPSIEQGVNNFVQYKFSHLPSKERQTTIELAKMFLNRINYWHLEAPSQRRLRSPNDDISGYKENYTRWLCYCNVPQFCDSLPRYETTKVFGRTLLRSVFTIMRRQLLEQARQEKDKLPLEKRTLILTHFPKFLSMLEEEVYSQNSPIWDQDFLSASSRTSPLGIQTVISPPVTGTALFSSNSTSHEQINGGRTSPGCRGSSGLEANPGEKRKMNNSHAPEEAKRSRVMGDIPVELINEVMSTITDPAGMLGPETNFLSAHSARDEAARLEERRGVIEFHVVGNSLNQKPNKKILMWLVGLQNVFSHQLPRMPKEYITRLVFDPKHKTLALIKDGRVIGGICFRMFPSQGFTEIVFCAVTSNEQVKGYGTHLMNHLKEYHIKHEILNFLTYADEYAIGYFKKQGFSKEIKIPKTKYVGYIKDYEGATLMGCELNPQIPYTEFSVIIKKQKEIIKKLIERKQAQIRKVYPGLSCFKDGVRQIPIESIPGIRETGWKPSGKEKSKEPKDPEQLYSTLKNILQQVKNHPNAWPFMEPVKRTEAPGYYEVIRFPMDLKTMSERLRNRYYVSKKLFMADLQRVFTNCKEYNPPESEYYKCASILEKFFFSKIKEAGLIDK

SEQ ID NO: 473 - protein, 418 aa, Mus musculus
MAFIAALGLLMAGICPAVLCFPDGTLGMDAAVQEDHDNGTQLDSLTLASINTDFAFSLYKELVLKNPDKNIVFSPLSISAALAVMSLGAKGNTLEEILEGLKFNLTETSEADIHQGFGHLLQRLNQPKDQVQISTGSALFIEKRQQILTEFQEKAKTLYQAEAFTADFQQPRQAKKLINDYVRKQTQGMIKELVSDLDKRTLMVLVNYIYFKAKWKVPFDPLDTFKSEFYCGKRRPVIVPMMSMEDLTTPYFRDEELSCTVVELKYTGNASALFILPDQGRMQQVEASLQPETLRKWKNSLKPRMIDELHLPKFSISTDYSLEDVLSKLGIREVFSTQADLSAITGTKDLRVSQVVHKAVLDVAETGTEAAAATGVKFVPMSAKLYPLTVYFNRPFLIMIFDTETEIAPFIAKIANPK

SEQ ID NO: 474 - protein, 1187 aa, Mus musculus
MDCSLLRTLVRRYCAGEENWVDSRTIYVGHKEPPPGAEAYIPQRYPDNRIVSSKYTFWNFIPKNLFEQFRRIANFYFLIIFLVQLIIDTPTSPVTSGLPLFFVITVTAIKQGYEDWLRHKADNAMNQCPVHFIQHGKLVRKQSRKLRVGDIVMVKEDETFPCDLIFLSSNRADGTCHVTTASLDGESSHKTHYAVQDTKGFHTEADVDSLHATIECEQPQPDLYKFVGRINVYNDLNDPVVRPLGSENLLLRGATLKNTEKIFGVAIYTGMETKMALNYQSKSQKRSAVEKSMNTFLIVYLCILVSKALINTVLKYVWQSEPFRDEPWYNEKTESERQRNLFLRAFTDFLAFMVLFNYIIPVSMYVTVEMQKFLGSYFITWDEDMFDEEMGEGPLVNTSDLNEELGQVEYIFTDKTGTLTENNMAFKECCIEGHVYVPHVICNGQVLPDSSGIDMIDSSPGVCGREREELFFRAICLCHTVQVKDDHCGDDVDGPQKSPDAKSCVYISSSPDEVALVEGVQRLGFTYLRLKDNYMEILNRENDIERFELLEVLTFDSVRRRMSVIVKSTTGEIYLFCKGADSSIFPRVIEGKVDQVRSRVERNAVEGLRTLCVAYKRLEPEQYEDACRLLQSAKVALQDREKKLAEAYEQIEKDLVLLGATAVEDRLQEKAADTIEALQKAGIKVWVLTGDKMETASATCYACKLFRRSTQLLELTTKKLEEQSLHDVLFDLSKTVLRCSGSMTRDSFSGLSTDMHDYGLIIDGAALSLIMKPREDGSSSGNYRELFLEICRNCSAVLCCRMAPLQKAQIVKLIKFSKEHPITLAIGDGANDVSMILEAHVGIGVIGKEGRQAARNSDYAIPKFKHLKKMLLVHGHFYYIRISELVQYFFYKNVCFIFPQFLYQFFCGFSQQTLYDTAYLTLYNISFTSLPILLYSLMEQHVGIDVLKRDPTLYRDIAKNALLRWRVFIYWTFLGVFDALVFFFGAYFIFENTTVTINGQMFGNWTFGTLVFTVMVLTVTLKLALDTHYWTWINHFVIWGSLLFYIAFSLLWGGVIWPFLSYQRMYYVFISMLSSGPAWLGIILLVTVGLLPDVLKKVLCRQLWPTATERTQNIQHQDSISEFTPLASLPSWGAQGSRLLAAQCSSPSGRVVCSRWESEECPVLPLHPGLPHKARYGCCRSSLEMPT

SEQ ID NO: 475 - protein, 337 aa, Mus musculus
MLGVAAGMTNSNMANALASATCERCKGGFAPAEKIVNSNGELYHEQCFVCAQCFQQFPEGLFYEFEGRKYCEHDFQMLFAPCCHQCGEFIIGRVIKAMNNSWHPECFRCDLCQEVLADIGFVKNAGRHLCRPCHDREKARGLGKYICQKCHAIIDEQPLTFKNDPYHPDHFNCANCGKELTADARELKGELYCLPCHDKMGVPICGACRRPIEGRVVNAMGKQWHVEHFVCAKCEKPFLGHRHYERKGLAYCETHYNQLFGDVCFHCNRVIEGDVVSALNKAWCVSCFACSTCNTKLTLKNKFVEFDMKPVCKKCYEKFPLELKKRLKKLSETLGRK

SEQ ID NO: 476 - protein, 354 aa, Mus musculus
MGRMVALSLLGIGLALLGERFLALRSRLKASREVESVDLPNCHLIKGIETGAEDIDILPNGLAFFSVGLKFPGLHSFAPDKPGGILMMDLKDERPRALELRVSWGFDLASFNPHGISTFIDDDDTVYLFVVNHPQFKSTVEIFKFQEEENSLLHLKTIKHELLPSVNDIIAVGPTHFYATNDHYFSDPFLKYLETYLNLHWANVVYYSPEEVKLVAEGFDSANGINISPDKKYVYVADILAHEIHVLEKQPNMNLTQLKVLQLGTLVDNLSIDPSSGDIWVGCHPNGQRLFVYHPNHPPASEVLRIQNILSEKPSVTTVYINNGSVLQGSSVATIYDRKLLVGTLYQKALYCEL

SEQ ID NO: 477 - protein, 204 aa, Mus musculus
MWTVPVLFWVLGSVWFWDSAQGGTIGVNEDDIVTPGTGDGMVPPGIEDKITTTGATGGLNESTGKAPLVPTQRERGTKPPLEELSTSATSDHDHREHESTTTVKVVTSHSVDKKTSHPNRDNAGDETQTTDKKDGLPVVTLVGIIVGVLLAIGFVGGIFIVVMKKISGRSRPKELNRTGCSPNTSENKRASNLPCSPSSSCGGR

SEQ ID NO: 478 - protein, 655 aa, Mus musculus
MGNGMCSRKQKRIFQTLLLLTVVFGFLYGAMLYLELQTQLRKAEAVALKYQQHQDSLSAQLQVVYEHRSRLEKSLQKERLEHKKAKEDFLVYKLEAQETLNKGRQDSNSRYSALNVQHQMLKSQHEELRKQHSDLEEEHRKQGEDFSRTFNDHKQRYLQLQQEKEQELSKLKETVYNLREENRQLRKAHQDIHTQLQDVKTQVAEYKQLKDTLNRIPSFRNPDPVEQQNVTFPHGTHPPQGYNGREKLTGELQEVQPNHEAGPRRMEEKPLSSMQKDAGFQALEEQNQVEPREPEERQVEEEHRKALEEEEMEQVGQAEHLEEEHDPSPEEQDRDWRDQQGQNAAHLLDGHPQAEVEHSTKAATNFQSPYEEQLEQQRLAARRDEEAQRLREHQEALHQQRLHGQLLRQQQQQQFLAREMAQQKQVAHEDGQQQHQEQLRQQAHYNAVENDIAQGVEDQGIPEEEGGAYDRDNQRQDEAEGDPGNRQELREPGHQEGDPEVEADRAAVEDINPADDPNNQGEDEFEEAEQVREENLPEESEEQKQSEAKQGNVEMDEHLVMAGNPDQQEDNVDEQYQDEGEEEVQEDLTEEKKREMEHNVEETYGEHPDDKNNDGEEQGVHNRAHPKGRQEHYEEEEDEEDGAAVAEKSHRRAEM

SEQ ID NO: 479 - protein, 200 aa, Mus musculus
MALSVMCLGLALLGVLQSQAQDSTQNLIPAPSLLTVPLQPDFRSDQFRGRWYVVGLAGNAVQKKTEGSFTMYSTIYELQENNSYNVTSILVRDQDQGCRYWIRTFVPSSRAGQFTLGNMHRYPQVQSYNVQVATTDYNQFAMVFFRKTSENKQYFKITLYGRTKELSPELKERFTRFAKSLGLKDDNIIFSVPTDQCIDN

SEQ ID NO: 480 - protein, 330 aa, Mus musculus
MTHFNKGPSYGLSAEVKNKIASKYDQQAEEDLRNWIEEVTGLGIGTNFQLGLKDGIILCELINKLQPGSVKKVNESSLNWPQLENIGNFIKAIQAYGMKPHDIFEANDLFENGNMTQVQTTLVALAGLAKTKGFHTTIDIGVKYAEKQTRRFDEGKLKAGQSVIGLQMGTNKCASQAGMTAYGTRRHLYDPKMQTDKPFDQTTISLQMGTNKGASQAGMLAPGTRRDIYDQKLTLQPVDNSTISLQMGTNKVASQKGMSVYGLGRQVYDPKYCAAPTEPVIHNGSQGTGTNGSEISDSDYQAEYPDEYHGEYPDDYPREYQYGDDQGIDY

SEQ ID NO: 481 - protein, 395 aa, Mus musculus
MQASCNQLHDPPGTAHEDAAASPCGHSRSTEGSLHPGDVHIQINSGPKEYSENPSSRNPRSGVCTCAHGCVHGRFRSYSHSEARPPDDFATESGEHGSGSFSEFRYLFKWLQKSLPYILILGIKLVMQHITGISLGIGLLTTFMYANKSIVNQVFLRERSSKLRCAWLLVFLAGSSVLLYYTFHSQSLHYSLIFLNPTLEQLSFWEVLWIVGITDFILKFFFMGLKCLILLVPSFIMPFKSKGYWYMLLEELCQYYRIFVPIPVWFRYLISYGEFGNVTTWSLGILLALLYLILKLLDFFGHLRTFRQVLRVFFTRPSYGVPASKRQCSDMDGICTICQAEFQKPVLLFCQHIFCEECITLWFNREKTCPLCRTVISECINKWKDGATSSHLQMY

SEQ ID NO: 482 - protein, 566 aa, Mus musculus
MDAELEFAIQPNTTGKQLFDQVVKTIGLREVWFFGLQYQDTKAFSTWLKLNKKVTAQDVRKESPLLFKFRAKFYPEDVSEELIQDITQRLFFLQVKEGILNDDIYCPPETAVLLASYAVQSKYGDFNKEVHKSGYLAGDKLLPQRVLEQHKLNKDQWEERIQVWHEEHRGMLREDAVLEYLKIAQDLEMYGVNYFSIKNKKGSELWLGVDALGLNIYEQNDRLTPKIGFPWSEIRNISFNDKKFVIKPIDKKAPDFVFYAPRLRINKRILALCMGNHELYMRRRKPDTIEVQQMKAQAREEKHQKQMERALLENEKKKRDVAEKEKEKIEREKEELMEKLKQIEEQTKKAQQELEEQTRSPLELEQERKRAQSEAEKLAKERQEAEEAKEALLQASRDQKKTQEQLASEMAELTARISQLEMARKKKESEAVEWQQKAQMVQEDLEKTRAELKTAMSTPHVAEPAENEHDEQDENGAEASAELRADAMAKDRSEEERTTEAEKNERVQKHLKALTSELANARDESKKTANDMIHAENMRLGRDKYKTLRQIRQGNTKQRIDEFESM

SEQ ID NO: 483 - protein, 1131 aa, Mus musculus
MQLQKHLLQEDLIEDCLGEQGLLVQVMSANQELLFKRDTFLGPMGVWVEGIKGDCNSAQMSLLQHFLPVPRVCVNVDQDLSRKECGLWMKADFDLSLGISALAGKLVGVAFCMEDFVIFTGFVSRKDEFGLQQTSRWPLLQLRDHKKLPYLSLEEEQKVVLEDRQPLGSRPGVGCQPPGTSETNRGHGEPVCPGRGPLRLWDLRLADDTVLSLPASADSLVTPVPRAQRPPGILQRPGCPSPRPCVCPGGGDTARLEGALVRRSGAAGAAVTSTSAGGEGAGRGGRRRPARGGPHSSCCAATAAPSLLLLDYDGSVLPFLGGLGGGYQKTLVVLTWIPALFIGFSQFSDSFLLDQPDFWCRGAGKGTELAGATVTGRWGDMGNWTSPSATPFSTASWGTTSNRSNSSDTPPLPSPPGKGNNDSNCDCHAWDYGIRTGLIQNVVSKKVWLLLIVVWMSISWPHPADAYAVESQLCDPGSSAVQPAFSFSNYCFQFISITASSCLLQGVRKLSVLRVLDVLSPCNDPLGQSLALNLPVYNDAHGLLRDTGDSINFAVVTVMGHSFTNSACSLDVYNINLLVDSHACGQMNINENKFESLGMAKLPHTSEILWWILYKITMYIDNLFRLKNHIAFCGQVPIGFSAAHDDILRGTCDMSPNDSAKTLWDLVCDNTWKVHIAKFSLLVGLIFGYLITGCIADWVGRRPVLLFSTIFILIFGLTVALSVNVTMFSTLRFFEGFCLAGIILTLYALRIELCPPGKRFIITMVASFVAMAGQFLMPGLAALCRDWQVLQALIICPFLLMLLYWSIFPESLRWLMATQQFESAKKLILYLTQKNCVSPESDIKGVMPELEKELSRRPKKVCIVKVVGTRNLWKNIVVLCVNSLTGYGIHHCFARSMMGHEVKVPLLENFYADYYTMASIALASCLAMCLVVKFLGRRGGLLLFMILTALASLLQLGLLNLIGKYSQHPDSGMSDSVKDKFSIAFSIVGMFASHAVGSLSVFFCAEITPTVIRCGGLGLVLASAGFGMLTAPIIELHNQKGYFLHHIIFACCTLICIICILLLPESRNQNLPENIANGEHYTRQPLLPHKKGEQPLLLTNAELKDYSGLHDVAAVGDGLPEGATANGMKTM

SEQ ID NO: 484 - protein, 241 aa, Mus musculus
MPKRTKLLPQQTFQVHQPRSLVSEGFTVKAMMKNSVVRGPPVAGAFKERPAKPTTFRKCYERGDFPIALEHDSKGNKIAWKVEIEKLDYHHYLPLFFDGLSEMTFPYEFFARRGIHDMLEHGGNKILPVIPQLIIPIKNALNLRNRQIICVTLKVLQHLVVSSEMVGEALLPYYRQILPILNIFKNMNVNSGDGIDYSQQKRENIGDLIQETLEAFERYGGEDAFINIKYMVPTYESCLLN

SEQ ID NO: 485 - protein, 257 aa, Mus musculus
MAADGVDERSPLLSASHSGNVTPTAPPYLQESSPRAELPPPYTAIASPGTSGIPVINCRVCQSLINLDGKLHQHVVKCTVCNEATPIKTPPTGKKYVRCPCNCLLICKDTSRRIGCPRPNCRRIINLGPVMLISEEQPAQPALPIQPEGTRVVCGHCGNTFLWMELRFNTLAKCPHCKKISSVGSALPRRRCCAYVTIGMICIFIAVGLTVGTQDFSRRFHATYVSWAIAYLLGLICLIRACYWGAIRVSYPEHGFA

SEQ ID NO: 486 - protein, 527 aa, Mus musculus
MSDSRDPASDQMKQWKEQRASQRPDVLTTGGGNPIGDKLNIMTAGSRGPLLVQDVVFTDEMAHFDRERIPERVVHAKGAGAFGYFEVTHDITRYSKGKVFEHIGKRTPIAVRFSTVAGESGSADTVRDPRGFAVKFYTEDGNWDLVGNNTPIFFIRDAILFPSFIHSQKRNPQTHLKDPDMVWDFWSLRPESLHQVSFLFSDRGIPDGHRHMNGYGSHTFKLVNADGEAVYCKFHYKTDQGIKNLPVGEAGRLAQEDPDYGLRDLFNAIANGNYPSWTFYIQVMTFKEAETFPFNPFDLTKVWPHKDYPLIPVGKVVLNKNPVNYFAEVEQMAFDPSNMPPGIEPSPDKKLQGRLFAYPDTHRHRLGPNYLQIPVNCPYRARVANYQRDGPMCMHDNQGGAPNYYPNSFSAPEQQRSALEHSVQCAVDVKRFNSANEDNVTQVRTFYTKVLNEEERKRLCENIAGHLKDAQLFIQKKAVKNFTDVHPDYGARIQALLDKYNAEKPKNAIHTYTQAGSHMAAKGKANL

SEQ ID NO: 487 - protein, 294 aa, Mus musculus
MIEVLTTDSQKLLHQLNTLLEQESRCQPKVCGLKLIESAHDNGLRMTARLRDFEVKDLLSLTQFFGFDTETFSLAVNLLDRFLSKMKVQAKHLGCVGLSCFYLAVKATEEERNVPLATDLIRISQYRFTVSDLMRMEKIVLEKVCWKVKATTAFQFLQLYYSLVHDTLPFERRNDLNFERLEAQLKACHCRIIFSKAKPSVLALSILALEIQALKYVELTEGVECIQKHSKISGRDLTFWQELVSKCLTEYSSNKCSKPNGQKLKWIVSGRTARQLKHSYYRITHLPTIPETIC

SEQ ID NO: 488 - protein, 137 aa, Mus musculus
MNHTSQAFITAASGGQPPNYERIKEEYEVAEMGAPHGSASVRTTVINMPREVSVPDHVVWSLFNTLFMNFCCLGFIAYAYSVKSRDRKMVGDVTGAQAYASTAKCLNISTLVLSILMVVITIVSVIIIVLNAQNLHT

SEQ ID NO: 489 - protein, 949 aa, Mus musculus
MMWKMGPHFTTLLAMWLVCGSASHSPALDSDSHTGRKVPLVSPISSRSARYLRHTGRSGGVEKSTQEEPNPQPFQRRKSVPVLRLAHPTMRPPPSGINGVPVRPEVRPIARSSAREMVRDEGSSARTRMLRFPSGSSSPNILASFAGKNRVWVISAPHASEGYYRLMMSLLKDDVYCELAERHIQQIVLFHQAGEEGGKVRRITNEGQILEQPLDPNLIPKLMSFLKLEKGKFSMVLLKKTLQVEERYPYPVRLEAMYEVIDQGPIRRIEKIRQKGFVQKCKASGIEGHVVQEGNEGGGGAGGTGLGGDKRKEDPRRTQVHPTREAPRKQATSKAATPQPPPTPRATTLPPAPVTTATRATSRVVTIAARPTTTTAYPATQRPWTSRLHPFSVSHRPPATAEVTTARGPSVSEQLYPLPRKEQQREKPQATRRPSKATNYGSFTATPPPTLWEVSARVVGTSRFRDNRTDKREHGHQDPNAVPGPHKPVKGKLPKKKDRILSNEYEDKYDLSQPTSSQGEEERRVDSVPSQNAKESKKLEKLEKPEKEKKKKGKSAKQDKLLKSEKQAKKAEKKTKQEKDKNKKKKAGKTEQDDNQKPTAKHLAPSPKKSVADLLGSFEGKRRLLLITTPKAENNMYVQQRDEYLESFCKMATRRISVVTIFGPVNNSSMKIDHFQLDNEKPMRVVDDDDLVDQHLISELRKEYGMTYDDFFMVLTDVDLRVKQYYEVPIAMKSVFDLIDTFQSRIKDMEKQKKEGIACKEDKRQSLENFLSRFRWRRRLLVISAPNDEDWAYSQQLSALNGQACNFGLRHITILKLLGVGEEVGGVLELFPINGSSIVEREDVPAHLVKDIRNYFQVSPEYFSMLLVGKDGNVKSWYPSPMWSMVIVYDLIDSMQLRRQEMAIQQSLGMRCPEDEYAGYGYHSYHQGYQDGYQDDYRHHESYHHGYPY

SEQ ID NO: 490 - protein, 196 aa, Mus musculus
MADGQLPFPCSYPSRLRRDPFRDSPLSSRLLDDGFGMDPFPDDLTAPWPEWALPRLSSAWPGTLRSGMVPRGPPATARFGVPAEGRSPPPFPGEPWKVCVNVHSFKPEELMVKTKDGYVEVSGKHEEKQQEGGIVSKNFTKKIQLPAEVDPATVFASLSPEGLLIIEAPQVPPYSPFGESSFNNELPQDNQEVTCS

SEQ ID NO: 491 - protein, 525 aa, Mus musculus
MLWLWLGLSGQKLLLWGAASAVSLAGATILISIFPMLVSYARKWQQMRSIPSVARAYPLVGHALYMKPNNAEFFQQLIYYTEEFRHLPIIKLWIGPVPLVALYKAENVEVILTSSKQIDKSFLYKFLQPWLGLGLLTSTGSKWRTRRKMLTPTFHFTILENFLDVMNEQANILVNKLEKHVNQEAFNCFFYITLCALDIICETAMGKNIGAQSNNDSEYVRTVYRMSDMIYRRMKMPWLWFDLWYLVFKEGRDHKRGLKCLHTFTNNVIAERVKERKAEEDWTGAGRGPIPSKNKRKAFLDLLLSVTDEEGNRLSQEDIREEVDTFMFEGHDTTAAAINWSLYLLGTNPEVQRKVDQELDEVFGRSHRPVTLEDLKKLKYLDCVIKETLRVFPSVPLFARSLSEDCEVGGYKVTKGTEAIIIPYALHRDPRYFPDPEEFRPERFFPENSQGRHPYAYVPFSAGPRNCIGQKFAVMEEKTILACILRQFWVESNQKREELGLAGDLILRPNNGIWIKLKRRHEDDP

SEQ ID NO: 492 - protein, 693 aa, Mus musculus
MAQGSHQIDFQVLHDLRQKFPEVPEVVVSRCMLQNNNNLDACCAVLSQESTRYLYGEGDLNFSDESGISGLRNHMTSLNLDLQSQNVYHHGREGSRVNGSRTLTHSVSDGQLHGGQSNNELFQQEPQTAPAQVPQGFNVFGMPSTSGASNSTPHLGFHLGSKGTSNLSQQTPRFNPIMVTLAPNIQTGRSTPTSLHIHGVPPPVLNSPQGNSIYIRPYITTPSGTARQTQQHSGWVSQFNPMNPQQAYQPSQPGPWTTYPASNPLPHTSTQQPNQQGHQTSHVYMPISSPTTPQPPTIHSSGSSQSSAHSQYNIQNISTGPRKNQIEIKLEPPQRNSSSKLRSSGPRTASTSSLVNSQTLNRNQPTVYIAASPPNTDEMISRSQPKVYISANATAGDEQGMRNQPTLFISTNSGPSAASRNMSGQVSMGPAFIHHHPPKSRVLGGNSATSPRVVVTQPNTKYTFKITVSPNKPPAVSPGVVSPTFELTNLLNHPDHYVETENIQHLTDPALAHVDRISEARKLSMGSDDAAYTQALLVHQKARMERLQRELEMQKKKLDKLKSEVNEMENNLTRRRLKRSNSISQIPSLEEMQQLRSCNRQLQIDIDCLTKEIDLFQARGPHFNPSAIHNFYDNIGFVGPVPPKPKDQRSTIKAPKTQDAEDEEGAQWNCTACTFLNHPALIRCEQCEMPRHF

SEQ ID NO: 493 - protein, 1100 aa, Mus musculus
MAGASVKVAVRVRPFNARETSQDAKCVVSMQGNTTSIINPKQSKDAPKSFTFDYSYWSHTSVEDPQFASQQQVYRDIGEEMLLHAFEGYNVCIFAYGQTGAGKSYTMMGRQEPGQQGIVPQLCEDLFSRVNVNQSAQLSYSVEVSYMEIYCERVRDLLNPKSRGSLRVREHPILGPYVQDLSKLAVTSYADIADLMDCGNKARTVAATNMNETSSRSHAVFTIVFTQRSHDQLTGLDSEKVSKISLVDLAGSERADSSGARGMRLKEGANINKSLTTLGKVISALADLQSKKRKSDFIPYRDSVLTWLLKENLGGNSRTAMIAALSPADINYEETLSTLRYADRTKQIRCNAVINEDPNARLIRELQEEVARLRDLLMAQGLSASALGGLKVEEGSPGGVLPPASSPPAPASPSSPPPHNGELEPSFSPSAEPQIGPEEAMERLQETEKIIAELNETWEEKLRKTEALRMEREALLAEMGVAVREDGGTVGVFSPKKTPHLVNLNEDPLMSECLLYHIKDGVTRVGQVDVDIKLTGQFIREQHCLFRSIPQPDGEVMVTLEPCEGAETYVNGKLVTELLVLKSGNRIVMGKNHVFRFNHPEQARLERERGVPPPPGPPSEPVDWNFAQKELLEQQGIDIKLEMEKRLQDLENQYRKEKEEADLLLEQQRLYADSDSGEDSDKRSCEESWRLISSLREQLPPTTVQNIVKRCGLPSSGKRRAPRRVYQIPQRRRLQGKDPRWATMADLKMQAVKEICYEVALADFRHGRAEIEALAALKMRELCRTYGKPEGPGDAWRAVARDVWDTVGEEEGCGGGGGGSEEGARGAEVEDLRAHIDKLTGILQEVKLQNSSKDRELQALRDRMLRMERVIPLTQDLEDDNDESGLVTWAPPEGPEAVEETVPNDHSPAVRPTSPPLSSWERVSRLMEEDPAFRRGRLRWLKQEQLRLQGLQGAGGRGGGLRRPPARFVPPHDCKLRFPFKSNPQHRESWPGMGSGEAPAPQPPEEVTVPPAPPNRRPPSPRRPHRSRRNSLDGGSRSRGGGSTQPEPQRLRPQKHNGYPQQPQPSPAQRPGPRYPPYTTPPRMRRQRSAPDLKESGAAV

SEQ ID NO: 494 - protein, 591 aa, Mus musculus
MEGKWLLCLLLVLGTAAVEAHDGHDDDAIDIEDDLDDVIEEVEDSKSKSDASTPPSPKVTYKAPVPTGEVYFADSFDRGSLSGWILSKAKKDDTDDEIAKYDGKWEVDEMKETKLPGDKGLVLMSRAKHHAISAKLNKPFLFDTKPLIVQYEVNFQNGIECGGAYVKLLSKTAELSLDQFHDKTPYTIMFGPDKCGEDYKLHFIFRHKNPKTGVYEEKHAKRPDADLKTYFTDKKTHLYTLILNPDNSFEILVDQSVVNSGNLLNDMTPPVNPSREIEDPEDRKPEDWDERPKIADPDAVKPDDWDEDAPSKIPDEEATKPEGWLDDEPEYIPDPDAEKPEDWDEDMDGEWEAPQIANPKCESAPGCGVWQRPMIDNPNYKGKWKPPMIDNPNYQGIWKPRKIPNPDFFEDLEPFKMTPFSAIGLELWSMTSDIFFDNFIISGDRRVVDDWANDGWGLKKAADGAAEPGVVLQMLEAAEERPWLWVVYILTVALPVFLVILFCCSGKKQSNAMEYKKTDAPQPDVKDEEGKEEEKNKRDEEEEEEKLEEKQKSDAEEDGVTGSQDEEDSKPKAEEDEILNRSPRNRKPRRE

SEQ ID NO: 495 - protein, 655 aa, Mus musculus
MPVGGLLPLFSSPGGGGLGSGLGGGLGGGRKGSGPAAFRLTEKFVLLLVFSAFITLCFGAIFFLPDSSKLLSGVLFHSNPALQPPAEHKPGLGARAEDAAEGRVRHREEGAPGDPGAGLEDNLARIRENHERALREAKETLQKLPEEIQRDILLEKEKVAQDQLRDKDLFRGLPKVDFLPPVGVENREPADATIREKRAKIKEMMTHAWNNYKRYAWGLNELKPISKEGHSSSLFGNIKGATIVDALDTLFIMGMKTEFQEAKSWIKKYLDFNVNAEVSVFEVNIRFVGGLLSAYYLSGEEIFRKKAVELGVKLLPAFHTPSGIPWALLNMKSGIGRNWPWASGGSSILAEFGTLHLEFMHLSHLSGDPVFAEKVMKIRTVLNKLDKPEGLYPNYLNPSSGQWGQHHVSVGGLGDSFYEYLLKAWLMSDKTDLEAKKMYFDAVQAIETHLIRKSSGGLTYIAEWKGGLLEHKMGHLTCFAGGMFALGADGAPEARAQHYLELGAEIARTCHESYNRTYVKLGPEAFRFDGGVEAIATRQNEKYYILRPEVIETYMYMWRLTHDPKYRTWAWEAVEALESHCRVNGGYSGLRDVYIARESYDDVQQSFFLAETLKYLYLIFSDDDLLPLEHWIFNTEAHPFPILREQKKEIDGKEK

SEQ ID NO: 496 - protein, 741 aa, Mus musculus
MLSLKKYLTEGLLQFTILLSLIGVRVDVDTYLTSQLPPLREIILGPSSAYTQTQFHNLRNTLDGYGIHPKSIDLDNYFTARRLLSQVRALDRFQVPTTEVNAWLVHRDPEGSVSGSQPNSGLALESSSGLQDVTGPDNGVRESETEQGFGEDLEDLGAVAPPVSGDLTKEDIDLIDILWRQDIDLGAGREVFDYSHRQKEQDVDKELQDGREREDTWSGEGAEALARDLLVDGETGESFPAQFPADVSSIPEAVPSESESPALQNSLLSPLLTGTESPFDLEQQWQDLMSIMEMQAMEVNTSASEILYNAPPGDPLSTNYSLAPNTPINQNVSLHQASLGGCSQDFSLFSPEVESLPVASSSTLLPLVPSNSTSLNSTFGSTNLAGLFFPSQLNGTANDTSGPELPDPLGGLLDEAMLDEISLMDLAIEEGFNPVQASQLEEEFDSDSGLSLDSSHSPSSLSSSEGSSSSSSSSSSSSASSSASSSFSEEGAVGYSSDSETLDLEEAEGAVGYQPEYSKFCRMSYQDPSQLSCLPYLEHVGHNHTYNMAPSALDSADLPPPSTLKKGSKEKQADFLDKQMSRDEHRARAMKIPFTNDKIINLPVEEFNELLSKYQLSEAQLSLIRDIRRRGKNKMAAQNCRKRKLDTILNLERDVEDLQRDKARLLREKVEFLRSLRQMKQKVQSLYQEVFGRLRDEHGRPYSPSQYALQYAGDGSVLLIPRTMADQQARRQERKPKDRRK

SEQ ID NO: 497 - protein, 550 aa, Mus musculus
MSPTISHKDSSRQRRSGMFSHALDMKSGPLPPGGWDDSRRDSVGGEGDREVLLGDAGPGDLPKAPRSYRSELSSILLLLFLYVLQGIPLGLAGSIPLILQSKNVSYTDQAFFSFVFWPFSLKLLWAPLVDAVYFKNFGRRKSWLVPTQYTLGIFMIYLSTQVDRLLGNIDGRTPDVVALTVTFFLFEFLAATQDIAVDGWALTMLSRENVGYASTCNSVGQTAGYFLGNVLFLALESADFCNKYLRFQPQPRGIVTLSDFLFFWGTVFLITTTLVALLKKENREASIVKEETQGITDTYKLLFSIIKMPAVLAFCLLILTSKIGFSAADAVTGLKLVEEGVPKEHLALLAVPMVPLQIILPLLISKYTAGPQPLNIFYKAMPYRLLLGLEYALLVWWTPKVEHQGGFPLYYYIIVLLSYALHQVTLYSMYVSIMAFNAKVSDPLIGGTYMTLLNTVSNLGGNWPSTVALWLVDPLTVKECVGASNQNCRTPDAIELCKKLGGSCVTALDGYYVESIICVLIGFGWWFFLGPKFKKLQDEGPSSWKCKRNN

SEQ ID NO: 498 - protein, 968 aa, Mus musculus
MQPKVPLGSRKQKPCSDMGDVQRAARSRGSLSAHMLLLLLASITMLLCARGAHGRPTEEDEELVLPSLERAPGHDSTTTRLRLDAFGQQLHLKLQPDSGFLAPGFTLQTVGRSPGSEAQHLDPTGDLAHCFYSGTVNGDPGSAAALSLCEGVRGAFYLQGEEFFIQPAPGVATERLAPAVPEEESSARPQFHILRRRRRGSGGAKCGVMDDETLPTSDSRPESQNTRNQWPVRDPTPQDAGKPSGPGSIRKKRFVSSPRYVETMLVADQSMADFHGSGLKHYLLTLFSVAARFYKHPSIRNSISLVVVKILVIYEEQKGPEVTSNAALTLRNFCNWQKQHNSPSDRDPEHYDTAILFTRQDLCGSHTCDTLGMADVGTVCDPSRSCSVIEDDGLQAAFTTAHELGHVFNMPHDDAKHCASLNGVTGDSHLMASMLSSLDHSQPWSPCSAYMVTSFLDNGHGECLMDKPQNPIKLPSDLPGTLYDANRQCQFTFGEESKHCPDAASTCTTLWCTGTSGGLLVCQTKHFPWADGTSCGEGKWCVSGKCVNKTDMKHFATPVHGSWGPWGPWGDCSRTCGGGVQYTMRECDNPVPKNGGKYCEGKRVRYRSCNIEDCPDNNGKTFREEQCEAHNEFSKASFGNEPTVEWTPKYAGVSPKDRCKLTCEAKGIGYFFVLQPKVVDGTPCSPDSTSVCVQGQCVKAGCDRIIDSKKKFDKCGVCGGNGSTCKKMSGIVTSTRPGYHDIVTIPAGATNIEVKHRNQRGSRNNGSFLAIRAADGTYILNGNFTLSTLEQDLTYKGTVLRYSGSSAALERIRSFSPLKEPLTIQVLMVGHALRPKIKFTYFMKKKTESFNAIPTFSEWVIEEWGECSKTCGSGWQRRVVQCRDINGHPASECAKEVKPASTRPCADLPCPHWQVGDWSPCSKTCGKGYKKRTLKCVSHDGGVLSNESCDPLKKPKHYIDFCTLTQCS

SEQ ID NO: 499 - protein, 188 aa, Mus musculus
MSTMFADTLLIVFISVCTALLAEGITWVLVYRTDKYKRLKAEVEKQSKKLEKKKETITESAGRQQKKKIERQEEKLKNNNRDLSMVRMKSMFAIGFCFTALMGMFNSIFDGRVVAKLPFTPLSYIQGLSHRNLLGDDTTDCSFIFLYILCTMSIRQNIQKILGLAPSRAATKQAGGFLGPPPPSGKFS

SEQ ID NO: 500 - protein, 684 aa, Mus musculus
MSSECDVGSSKAVVNGLASGNHGPDKDMDPTKICTGKGTVTLRASSSYRGTPSSSPVSPQESPKHESKSDEWKLSSSADTNGNAQPSPLAAKGYRSVHPSLSADKPQGSPLLNEVSSSHIETDSQDFPPTSRPSSAYPSTTIVNPTIVLLQHNREQQKRLSSLSDPASERRAGEQDPVPTPAELTSPGRASERRAKDASRRVVRSAQDLSDVSTDEVGIPLRNTERSKDWYKTMFKQIHKLNRDDDSDVHSPRYSFSDDTKSPLSVPRSKSEMNYIEGEKVVKRSATLPLPARSSSLKSSPERNDWEPLDKKVDTRKYRAEPKSIYEYQPGKSSVLTNEKMSSAVSPTPDITSEPPGYIYSSNFHAVKRESDGTPGGLASLENERQIYKSVLEGGDIPLQGLSGLKRPSSSASTKDSESPRHFIPADYLESTEEFIRRRHDDKEMRPARAKFDFKAQTLKELPLQKGDVVYIYRQIDQNWYEGEHHGRVGIFPRTYIELLPPAEKAQPRKLAPVQVLEYGEAIAKFNFNGDTQVEMSFRKGERITLLRQVDENWYEGRIPGTSRQGIFPITYVDVLKRPLVKTPVDYIDLPYSSSPSRSATVSPQQPQAQQRRVTPDRSQPSLDLCSYQALYSYVPQNDDELELRDGDIVDVMEKCDDGWFVGTSRRTRQFGTFPGNYVKPLYL

SEQ ID NO: 501 - protein, 218 aa, Mus musculus
MNLLFRLAVFLSLWCCSDAQGQTKEESTEEVKIEVLHRPENCSKTSRKGDLLNAHYDGYLAKDGSKFYCSRTQDEGHPKWFVLGVGHVIKGLDIAMMDMCPGEKRKVIIPPSFAYGKEGYAEGKIPPNATLMFEIELYAVTKGPRSIETFKQIDTDNDRQLSKAEIELYLQKDFEKDANPRDKSYQKAVLEDIFKKNDHNGDGFISPKEYNVHQHDEL

SEQ ID NO: 502 - protein, 405 aa, Mus musculus
MRPPRAAAVLLLLLAGLAHGASALFEVKNNGTTCIMASFSASFLTTYETANGSQIVNISLPASAEVLKNGSSCGKENVSDPSLTITFGRGYLLTLNFTKNTTRYSVQHMYFTYNLSDTEHFPNAISKEIYTMDSTTDIKADINKAYRCVSDIRVYMKNVTVVLRDATIQAYLSSGNFSKEETHCTQDGPSPTTGPPSPSPPLVPTNPTVSKYNVTGNNGTCLLASMALQLNITYLKKDNKTVTRAFNISPNDTSSGSCGINLVTLKVENKNRALELQFGMNASSSLFFLQGVRLNMTLPDALVPTFSISNHSLKALQATVGNSYKCNTEEHIFVSKMLSLNVFSVQVQAFKVDSDRFGSVEECVQDGNNMLIPIAVGGALAGLILIVLIAYLIGRKRSHAGYQTI

SEQ ID NO: 503 - protein, 805 aa, Mus musculus
MSSGANITYASRKRRKPVQKTVKPIPAEGIKSNPSKRHRDRLNTELDRLASLLPFPQDVINKLDKLSVLRLSVSYLRAKSFFDVALKSTPADRNGGQDQCRAQIRDWQDLQEGEFLLQALNGFVLVVTADALVFYASSTIQDYLGFQQSDVIHQSVYELIHTEDRAEFQRQLHWALNPDSAQGVDEAHGPPQAAVYYTPDQLPPENASFMERCFRCRLRCLLDNSSGFLAMNFQGRLKYLHGQNKKGKDGALLPPQLALFAIATPLQPPSILEIRTKNFIFRTKHKLDFTPIGCDAKGQLILGYTEVELCTRGSGYQFIHAADILHCAESHIRMIKTGESGMTVFRLLAKHSRWRWVQSNARLIYRNGRPDYIIATQRPLTDEEGREHLQKRSTSLPFMFATGEAVLYEISSPFSPIMDPLPIRTKSNTSRKDWAPQSTPSKDSFHPSSLMSALIQQDESIYLCPPSSPALLDSHFLMGSVSKCGSWQDSFAAAGSEAALKHEQIGHAQDVNLALSGGPSELFPDNKNNDLYSIMRNLGIDFEDIRSMQNEEFFRTDSTAAGEVDFKDIDITDEILTYVQDSLNNSTLLNSACQQQPVTQHLSCMLQERLQLEQQQQLQQPPPQALEPQQQLCQMVCPQQDLGPKHTQINGTFASWNPTPPVSFNCPQQELKHYQLFSSLQGTAQEFPYKPEVDSVPYTQNFAPCNQPLLPEHSKSVQLDFPGRDFEPSLHPTTSNLDFVSCLQVPENQSHGINSQSAMVSPQAYYAGAMSMYQCQPGPQRTPVDQTQYSSEIPGSQAFLSKVQS

SEQ ID NO: 504 - protein, 1042 aa, Mus musculus
MRPKTFPATTYSGNSRQRLQEIREGLKQPSKASTQGLLVGPNSDTSLDAKVLGSKDASRQQQMRATPKFGPYQKALREIRYSLLPFANESGTSAAAEVNRQMLQELVNAGCDQEMAGRALKQTGSRSIEAALEYISKMGYLDPRNEQIVRVIKQTSPGKGLAPTPVTRRPSFEGTGEALPSYHRLGGANYEGPAALEEMPRQYLDFLFPGAGAGTHGAQAHQHPPKGYSTAVEPSAHFPGTHYGRGHLLSEQPGYGVQRSSSFQNKTPPDAYSSMAKAQGGPPASLTFPAHAGLYTASHHKPAATPPGAHPLHVLGTRGPTFTGESSAQAVLAPSRNSLNADLYELGSTVPWSAAPLARRDSLQKQGLEASRPHVAFRAGPSRTNSFNNPQPEPSLPAPNTVTAVTAAHILHPVKSVRVLRPEPQTAVGPSHPAWVAAPTAPATESLETKEGSAGPHPLDVDYGGSERRCPPPPYPKHLLLPSKSEQYSVDLDSLCTSVQQSLRGGTEQDRSDKSHKGAKGDKAGRDKKQIQTSPVPVRKNSRDEEKRESRIKSYSPYAFKFFMEQHVENVIKTYQQKVSRRLQLEQEVAKAGLCEAEQEQMRKILYQKESNYNRLKRAKMDKSMFVKIKTLGIGAFGEVCLACKLDTHALYAMKTLRKKDVLNRNQVAHVKAERDILAEADNEWVVKLYYSFQDKDSLYFVMDYIPGGDMMSLLIRMEVFPEHLARFYIAELTLAIESVHKMGFIHRDIKPDNILIDLDGHIKLTDFGLCTGFRWTHNSKYYQKGNHMRQDSMEPGDLWDDVSNCRCGDRLKTLEQRAQKQHQRCLAHSLVGTPNYIAPEVLLRKGYTQLCDWWSVGVILFEMLVGQPPFLAPTPTETQLKVINWESTLHIPTQVRLSAEARDLITKLCCAADCRLGRDGADDLKAHPFFNTIDFSRDIRKQPAPYVPTISHPMDTSNFDPVDEESPWHEASGESAKAWDTLASPSSKHPEHAFYEFTFRRFFDDNGYPFRCPKPSEPAESADPGDADLEGAAEGCQPVYV

SEQ ID NO: 505 - protein, 463 aa, Mus musculus
  MOD_RES (100)..(100): Variable amino acid
  MOD_RES (303)..(303): Variable amino acid
METVLRENARLQRDNERLQRELESTSEKAGRIEKLENEIQRLSEAHESLMRTSSKREALEKTMRNKMDGEMRRLQDFNRDLRERLESANRHLASKTQEAXAGSQDMVAKLLAQSYEQQQEQEKLEREMALLRGAIEDQRRHAELLEQALGNAQSRAARAEEELRKKQAYVERVERLQQALGQLQAACEKREQLELRLRTRLEQELKALRAQQRQTGTLAGGGGSHGGSAELSALRLSEQLREKEEQILALEADMTKWEQKYLEERAMRQFAMDAAATAAAQRDTTLIRHSPQPSPSSSFNEGXLPGNHRHQEMESRLKVLHAQILEKDAVIKVPQQRSRKDPGKATQGTLWPAKSVPSIFAAAVGTQGWQGLVSSERQTDARPAGDRVPAEEPPATAPLPAHTKHGSRDGSTQTDGPADNTSACLASEPDGLLGCNSSQRTPSLDSIAATRVQDLSDMVEILI

SEQ ID NO: 506 - protein, 472 aa, Mus musculus
MEPAQQPPPQPAPQGPAPPSVSPAGTPAAPPAPPAGHQVVHVRGDSETDLEALFNAVMNPKTANVPQTVPMRLRKLPDSFFKPPEPKSHSRQASTDAGTAGALTPQHVRAHSSPASLQLGAVSPGTLTASGVVSGPAAAPAAQHLRQSSFEIPDDVPLPAGWEMAKTSSGQRYFLNHNDQTTTWQDPRKAMLSQLNVPAPASPAVPQTLMNSASGPLPDGWEQAMTQDGEVYYINHKNKTTSWLDPRLDPRFAMNQRITQSAPVKQPPPLAPQSPQGGVLGGGSSNQQQQIQLQQLQMEKERLRLKQQELFRQELALRSQLPTLEQDGGTPNAVSSPGMSQELRTMTTNSSDPFLNSGTYHSRDESTDSGLSMSSYSIPRTPDDFLNSVDEMDTGDTISQSTLPSQQSRFPDYLEALPGTNVDLGTLEGDAMNIEGEELMPSLQEALSSEILDVESVLAATKLDKESFLTWL

SEQ ID NO: 507 - protein, 178 aa, Mus musculus
MSGGKYVDSEGHLYTVPIREQGNIYKPNNKAMADEVTEKQVYDAHTKEIDLVNRDPKHLNDDVVKIDFEDVIAEPEGTHSFDGIWKASFTTFTVTKYWFYRLLSTIFGIPMALIWGIYFAILSFLHIWAVVPCIKSFLIEIQCISRVYSIYVHTFCDPLFEAIGKIFSNIRISTQKEI

SEQ ID NO: 508 - protein, 396 aa, Mus musculus
MVMFKKIKSFEVVFNDPEKVYGSGEKVAGRVIVEVCEVTRVKAVRILACGVAKVLWMQGSQQCKQTLDYLRYEDTLLLEEQPTGENEMVIMRPGNKYEYKFGFELPQGPLGTSFKGKYGCVDYWVKAFLDRPSQPTQEAKKNFEVMDLVDVNTPDLMAPVSAKKEKKVSCMFIPDGRVSVSARIDRKGFCEGDDISIHADFENTCSRIVVPKAAIVARHTYLANGQTKVFTQKLSSVRGNHIISGTCASWRGKSLRVQKIRPSILGCNILKVEYSLLIYVSVPGSKKVILDLPLVIGSRSGLSSRTFSMASRTSSEMSWIDLNIPDTPEAPPCYMDIIPEDHRLESPTTPLLDDVDDSQDSPIFMYAPEFQFMPPPTYTEVDPCVLNNNNNNNNVQ

SEQ ID NO: 509 - protein, 510 aa, Mus musculus
MPGLGRRAQWLCWWWGLLCSCGPPPLRPPLPVAAAAAGGQLLGAGGSPVRAEQPPPQSSSSGFLYRRLKTHEKREMQKEILSVLGLPHRPRPLHGLQQPQPPVLPPQQQQQQQQQQTAREEPPPGRLKSAPLFMLDLYNALSNDDEEDGASEGVGQEPGSHGGASSSQLRQPSPGAAHSLNRKSLLAPGPGGGASPLTSAQDSAFLNDADMVMSFVNLVEYDKEFSPHQRHHKEFKFNLSQIPEGEAVTAAEFRVYKDCVVGSFKNQTFLISIYQVLQEHQHRDSDLFLLDTRVVWASEEGWLEFDITATSNLWVVTPQHNMGLQLSVVTRDGLHVNPRAAGLVGRDGPYDKQPFMVAFFKVSEVHVRTTRSASSRRRQQSRNRSTQSQDVSRGSGSSDYNGSELKTACKKHELYVSFQDLGWQDWIIAPKGYAANYCDGECSFPLNAHMNATNHAIVQTLVHLMNPEYVPKPCCAPTKLNAISVLYFDDNSNVILKKYRNMVVRACGCH

SEQ ID NO: 510 - protein, 589 aa, Mus musculus
MEMPTSDGSLSEGLISYLIRERGSAPRCAPEKHLSRLKQDVANTKMELKATLKEAQLASCSVELLLPLFKNTVEGISLENANLSASSLKKIFEQNDILSKELDTFNRVKLALEHLIKQTDYEQIGDSLLCLLKDLSDNESENRNLEEKVLEKETYIRELSCLFQNEKESALKANRLSQSVKVVHDRLQRQIQKREAENEKLKEHVQSLETQIAKWNLQVKMNKQEAVAIKEASRQKAVALKKASKVYRQRLRHFTGDIERLASQVRDQEAKLSETVSASSDWKSQFEKIAIEKTELEVQIETMKKQIANLLEDLRKMETHGKNSCEEILRKLHSLEDENEALNIENVKLKGTLDALKDEVASVENELVELQEVEKRQKTLVEGYRTQVQKLQEAAEMVKSRCKNLLHENNLIITNKNKKLEKVDGNQSLLTKLSLEEENHLIQLKCENLKEKLEQMDAENKELEKKLADQEECLKHSDLELKEKAAEYTALSRQLEAALEEGRQKVSEEVEKMSSRERALQIKILDLEAELRKKNEEQNQLVDKMNTKTQHQAICLKEIQHSLEKSETRNESIKNYLQFLQISYVTMFR

SEQ ID NO: 511 - protein, 682 aa, Mus musculus
MAARSLGSGVGRLLRGLQGRSGQSGWSLSVSRSTATRLPGCVPAAAQPGSYPALSAQAAQEPAAFWGPLARDTLVWDTPYHTVWDCDFRTGKIGWFLGGQLNVSVNCLDQHVQKSPETIALIWERDEPGTEVRITYRELLETTCRLANTLKRHGVHRGDRVAIYMPVSPLAVAAMLACARIGAIHTVVFAGFSAESLAGRINDAKCKAVITFNQGLRGGRVVELKKIVDEAVKSCPTVQHVLVAHRTDTKVPMGSLDIPLEQEMAKEAPVCTPESMSSEDMLFMLYTSGSTGTPKGLVHTQAGYLLYAAMTHKLVFDYQPGDVFGCVADIGWITGHSYVVYGPLCNGATTVLFESTPVYPDAGRYWETVQRLKINQFYGAPTAVRLLLKYGDAWVKKYDRSSLRTLGSVGEPINHEAWEWLHKVVGDGRCTLVDTWWQTETGGICIAPRPSEDGAEILPGMAMRPFFGIVPVLMDEKGNVLEGGDVSGALCISQAWPGMARTIYGDHQRFVDAYFRAYPGYYFTGDGAHRTEGGYYQITGRMDDVINISGHRLGTAEIEDAMADHPAVPETAVIGYPHDIKGEAAFAFIVLKDNISDENMVVNELKLSVATKIAKYAVPDQILVVKRLPKTRSGKVMRRLLRKIITSRGQDLGDTTTLEDPSVITEILSAFQKYEEQRAATN

SEQ ID NO: 512 - protein, 298 aa, Mus musculus
METVHSTFLLLLFVPLTQQAPQSQLDSHVNYEYATGNSEETKFSQDYEDKYLDGKSIKEKETMIIPDEKSLQLQKDEVIPSLPTKKENDEMPTCLLCVCLSGSVYCEEVDIDAVPPLPKESAYLYARFNKIKKLTAKDFADMPNLRRLDFTGNLIEDIEDGTFSKLSLLEELTLAENQLLRLPVLPPKLTLLNAKHNKIKSKGIKANTFKKLNKLSFLYLDHNDLESVPPNLPESLRVIHLQFNSISSLTDDTFCKANDTRYIRERIEEIRLEGNPIALGKHPNSFICLKRLPIGSYF

SEQ ID NO: 513 - protein, 697 aa, Mus musculus
MCRSLRYCVSHCLYLAMTRLEEVNREVNMHSSVRYLGYLARINLLVAICLGLYVRWEKTANSLILVIFILGLFVLGIASILYYYFSMEAASLSLSNLWFGFLLGLLCFLDNSSFKSDVKEETTKYLLLTSIVLRILCALVERISGYVRHRPTLLTTVEFLELVGFAIASTTMLVEKSLSVILLVMALAMLIIDLRMKSFLAIPNLIIFSVLLFFSSLETPQNPIAFACFFICLVTDPFLDIYFSGLSVTERWKPFLHRGRICRRLSVLFTAMIELTFFILSAFKLRDTHLWYFVIPGFSIFGFFWMICHIIFLLTLWGFHTKLNDCHKVYINHRADNNSLDRIMASKGMRHFCLISEQLVFFSLLATAILGAVSWQPTNGIFLSMFLIVLPLESMAHGLFHELGNCLGGTSVGYAIVIPTNFCSPDGQPTLLPPEHVQELNLRSTGMLNAIQRFFAYHMIETYGCDYSTSGLSFDTLHSKLKAFLELRTVDGPRHDTYVLYYSGHTHGSGEWALAGGDILRLDTLLEWWREKNGSFCSRLIIILDSENSTPWVKEVRKINDQYVAVQGAELAKTVDIEEADPPQLGDFTRDWVEYNCNSTNNICWTEKGRTVRAVYGVSKRWSDYTLHLPTGSDVAKHWMLHFPRVTYPLVHLANWLCGLNLFWVCKACFRCLKRLKMSWFLPTVLDTGQGFKLVKS

SEQ ID NO: 514 - protein, 268 aa, Mus musculus
MSAALFSLDSPVRGTPWPTEPAAFYEPGRVDKPGRGPEPGDLGELGSTTPAMYDDESAIDFSAYIDSMAAVPTLELCHDELFADLFNSNHKAAGAGGLELLQGGPTRPPGVGSVARGPLKREPDWGDGDAPGSLLPAQVAVCAQTVVSLAAAAQPTPPTSPEPPRGSPGPSLAPGTVREKGAGKRGPDRGSPEYRQRRERNNIAVRKSRDKAKRRNQEMQQKLVELSAENEKLHQRVEQLTRDLAGLRQFFKKLAQPAFLPPTGADCR

SEQ ID NO: 515 - protein, 335 aa, Mus musculus
MALLGRAFFAGVSRLPCDPGPQRFFSFGTKTLYQSKDAPQSKFFQPVLKPMLPPDAFQGKVAFITGGGTGLGKAMTTFLSTLGAQCVIASRNIDVLKATAEEISSKTGNKVHAIRCDVRDPDMVHNTVLELIKVAGHPDVVINNAAGNFISPSERLTPNGWKTITDIVLNGTAYVTLEIGKQLIKAQKGAAFLAITTIYAESGSGFVMPSSSAKSGVEAMNKSLAAEWGRYGMRFNIIQPGPIKTKGAFSRLDPTGRFEKEMIDRIPCGRLGTMEELANLATFLCSDYASWINGAVIRFDGGEEVFLSGEFNSLKKVTKEEWDIIEGLIRKTKGS

SEQ ID NO: 516 - protein, 873 aa, Mus musculus
MASRRKSTTPCMVLASEQDPDLELISDLDEGPPILTPVENAKAESVSSDEEVHGSVDSDNQQNKKVEGGYECKYCTFQTPDLNMFTFHVDSEHPNVVLNSSYVCVECNFLTKRYDALSEHNLKYHPGEENFKLTMVKRNNQTIFEQTINDLTFDGSFVKEENTEQGESIDVSSSGISISKTPIMKMMKNKVENKRITVHHNSAEGTSEEKENGVKASQEENAESVSSSALESNTSTSTINRVHPSPASTVVTPTAVLPGLAQVITAVSAQQNSNLLPKVLIPVNSIPTYNAALDNNPLLLNTYNKFPYPTMSEITVLSAQAKYTEEQIKIWFSAQRLKHGVSWTPEEVEEARRKQFNGTVHTVPQTITVIPTHISTGSNGLPSILQTCQIVGQPGLVLTQVAGTNTLPVTAPIALTVAGVPNQTNVQKSQVPAAQPATDTKPATAAVPSSPSVRPEAALVNPDSFGIRAKKTKEQLAELKVSYLKNQFPHDSEIIRLMKITGLTKGEIKKWFSDTRYNQRNSKSNQCLHLNNDSSATIIIDSSDETPEPPAAAASQQKQSWNPFPDFAPQKFKEKTAEQLRALQASFLNSSVLTDEEVNRLRAQTKLTRREIDAWFTEKNKTKALKDEKIEVDESNVGSSKEEPGESSPGDETVAPKSGGTGKICKKTPEQLHMLKSAFVRTQWPSAEEYDKLAEESGLARTDIVSWFGDTRYAWKNGNLKWYYYYQSSNSSSLNGLSSLRRRGRGRPKGRGRGRPRGRPRGGKRMNTWDRVPSLIKFKTGTAILKDYYLKHKFLNEQDLDELVNRSHMGYEQVREWFAERQRRSELGIELFEENEEEDEVVDDQEEDEEETDDSDTWEPPRHVKRKLSKSDD

SEQ ID NO: 517 - protein, 358 aa, Mus musculus
MPAHILQEISGAYSATTTITAPPSGGQQNGGEKFEKSSHHWGADVRPELKDDLYDPTYQDDEGPPPKLEYVWRNIILMALLHLGALYGITLVPSCKLYTCLFAYLYYVISALGITAGAHRLWSHRTYKARLPLRLFLIIANTMAFQNDVYEWARDHRAHHKFSETHADPHNSRRGFFFSHVGWLLVRKHPAVKEKGGKLDMSDLKAEKLVMFQRRYYKPDLLLMCFVLPTLVPWYCWGETFVNSLCVSTFLRYAVVLNATWLVNSAAHLYGYRPYDKNISSRENILVSMGAVGERFHNYHHAFPYDYSASEYRWHINFTTFFIDCMALLGLAYDRKRVSRAAVLARIKRTGDGSCKSG

SEQ ID NO: 518 - protein, 333 aa, Mus musculus
MTDQAFVTLTTNDAYAKGALVLGSSLKQHRTTRRMVVLTSPQVSDSMRKVLETVFDDVIMVDVLDSGDSAHLTLMKRPELGITLTKLHCWSLTQYSKCVFMDADTLVLSNIDDLFEREELSAAPDPGWPDCFNSGVFVYQPSIETYNQLLHLASEQGSFDGGDQGLLNTYFSGWATTDITKHLPFVYNLSSISIYSYLPAFKAFGKNAKVVHFLGRTKPWNYTYNPQTKSVNCDSQDPTVSHPEFLNLWWDTFTTNVLPLLQHHGLVKDASSYLMMEHVSGALSDLSFGEAPAAPQPSMSSEERKERWEQGQADYMGADSFDNIKRKLDTYLQ

SEQ ID NO: 519 - protein, 741 aa, Mus musculus
MAAAGPEPRLLLLLLLLLPPLPPVTSASDRPRGANAVNPDKLLVITVATAETEGYRRFLQSAEFFNYTVRTLGLGQEWRGGDVARTVGGGQKVRWLKKEMEKYADQKDMIIMFVDSYDVILASSPTELLKKFVQSGSHLLFSAESFCWPEWGLAEQYPEVGMGKRFLNSGGFIGFAPTIHQIVRQWNYKDDDDDQLFYTQLYLDPGLREKLKLSLDHKSRIFQNLNGALDEVILKFDQNRVRIRNVAYDTLPVVVHGNGPTKLQLNYLGNYVPNGWTPQGGCGFCNQTLRTLPGGQPPPRVLLAVFVEQPTPFLPRFLQRLLLLDYPPDRISLFLHNSEVYHEPHIADAWPQLQDHFSAVKLVGPEEALSAGEARDMAMDSCRQNPECEFYFSLDADAVLTNPETLRVLIEQNRKVIAPMLSRHGKLWSNFWGALSPNEYYARSEDYVELVQRKRVGVWNVPYISQAYVIRGETLRTELPQKEVFSSSDTDPDMAFCKSVRDKGIFLHLSNQHEFGRLLATSRYDTDHLHPDLWQIFDNPVDWREQYIHENYSRALDGEGLVEQPCPDVYWFPLLTEQMCDELVEEMEHYGQWSGGRHEDSRLAGGYENVPTVDIHMKQVGYEDQWLQLLRTYVGPMTEYLFPGYHTKTRAVMNFVVRYRPDEQPSLRPHHDSSTFTLNVALNHKGVDYEGGGCRFLRYDCRISSPRKGWALLHPGRLTHYHEGLPTTRGTRYIMVSFVDP

SEQ ID NO: 520 - protein, 578 aa, Mus musculus
MAVRWTWAGKSCLLLALLTLAYILVEFSVSTLYASPGAGGARELGPRRLPDLDTREEDLSQPLYIKPPADSHALGEWGRASKLQLNEGELKQQEELIERYAINIYLSDRISLHRHIEDKRMYECKAKKFHYRSLPTTSVIIAFYNEAWSTLLRTIHSVLETSPAVLLKEIILVDDLSDRIYLKAQLETYISNLERVRLIRTNKREGLVRARLIGATFATGDVLTFLDCHCECNTGWLEPLLERISRDETAIVCPVIDTIDWNTFEFYMQTGEPMIGGFDWRLTFQWHSVPKHERDRRTSRIDPIRSPTMAGGLFAVSKKYFQYLGTYDTGMEVWGGENLELSFRVWQCGGKLEIHPCSHVGHVFPKRAPYARPNFLQNTARAAEVWMDEYKEHFYNRNPPARKEAYGDLSERKLLRERLKCKSFDWYLKNVFSNLHVPEDRPGWHGAIRSMGISSECLDYNAPDNNPTGANLSLFGCHGQGGNQFFEYTSNKEIRFNSVTELCAEVPQQKDYVGMQNCPKDGLPVPVNIIWHFKEDGTIFHPHTRLCLSAYRTAEGRPSVHMKTCDALDKNQLWRFEK

SEQ ID NO: 521 - protein, 225 aa, Mus musculus
MVTHSKFPAAGMSRPLDTSLRLKTFSSKSEYQLVVNAVRKLQESGFYWSAVTGGEANLLLSAEPAGTFLIRDSSDQRHFFTLSVKTQSGTKNLRIQCEGGSFSLQSDPRSTQPVPRFDCVLKLVHHYMPPPGTPSFSLPPTEPSSEVPEQPPAQALPGSTPKRAYYIYSGGEKIPLVLSRPLSSNVATLQHLCRKTVNGHLDSYEKVTQLPGPIREFLDQYDAPL

SEQ ID NO: 522 - protein, 577 aa, Mus musculus
MSAATQSPMMQMASGNGASDRDPLPPGWEIKIDPQTGWPFFVDHNSRTTTWNDPRVPPEGPKDTASSANGPSRDGSRLLPIREGHPIYPQLRPGYIPIPVLHEGSENRQPHLFHAYSQPGVQRFRTEAAAATPQRSQSPLRGGMTEAAQTDKQCGQMPATATTAAAQPPTAHGPERSQSPAASDCSSSSSSASLPSSGRSSLGSHQLPRGYIPIPVIHEQNITRPAAQPSFHQAQKTHYPAQQGEYQPQQPVYHKIQGDDWEPRPLRAASPFRSPVRGASSREGSPARSGTPVHCPSPIRVHTVVDRPQPMTHREPPPVTQPENKPESKPGPAGPDLPPGHIPIQVIRREADSKPVSQKSPPPAEKVEVKVSSAPIPCPSPSPAPSAVPSPPKNVAAEQKAAPSPAPAEPAAPKSGEAETPPKHPGVLKVEAILEKVQGLEQAVDSFEGKKTDKKYLMIEEYLTKELLALDSVDPEGRADVRQARRDGVRKVQTILEKLEQKAIDVPGQVQVYELQPSNLEAEQPLQEIMGAVVADKDEKGPENKDPQTESQQLEAKAATPPNPSNPADSAGNLVAP

SEQ ID NO: 523 - protein, 591 aa, Mus musculus
MAQESADLASDCQSWLQKLSAWEQASSEETQKDTCLHLSGFQEFLRQMYEILKEMDSDAILERFPTIGQLLAKACWNPLIFSIYESQKIVIWCLCCLMNKEPRTSAESGLNSWIRGLLSHVLSAFRFDMKEVCLFTKSLGYESIDYYPSLLKNMVLSLVSELRESHLNGLSTQSRMAPERMMSLSEVCVPLVTLPDMEPLVEALLTYHGHEPQEVLAPEFFEAVNEAFLSEKIVVPTSSVVSLWFRHLPSLEKATLHLFEKLFSSKIICLRRMECCIRESFLPQAACQPAIFRIVHEMFRFVLLKTDGAPEVLAALQVFTSCLVEALKKENKQLTFALRTYFPYGAPCLAAALSQHPEAIPQGHRLQPLLHISQLLREAVEDCTRGSPRNPFESWFLFVHFGGWVDLAVAELLLREEAEPPAGLLWLLVFYYSPQDGSQQREQSMVELKVLINRLLMLLRSGPLSATDLQEAAESPSGDPRPPVCGQLVRRLLLSLLLWTPEGHAIVWEAVTHGPTFEITGPGCCPRIWRSTKPQHRPRAHLCCTEMAHTDAVIHEIIGFLDQTLYRSQHLCVEASRKLARDLLKELQAQV

SEQ ID NO: 524 - protein, 160 aa, Mus musculus
MTLEELVASDNAVQKMQAVTAAVEQLLVAAQRQDRLTVGVYEAAKLMNVDPDSVVLCLLAIDEEEEDDIALQIHFTLIQSFCCDNDIDIVRVSGMQRLAQLLGEPAETLGTTEARDLHCLLVTNCHTDSWKSQGLVEVASYCEESRGNNQWVPYISLEER

SEQ ID NO: 525 - protein, 1265 aa, Mus musculus
MEDGKPVWAPHPTDGFQMGNIVDIGPDSLTIEPLNQKGKTFGALINQVFPAEEDSKKDVEDNCSLMYLNEATLLHNVKVRYSKDRIYTYVANILIAVNPYFDIPKIYSSDTIKSYQGKSLGTMPPHVFGIADKAFRDMKVLKMSQSIIVSGESGAGKTENTKFGSKIPDRILWTGQDIDDRIVEANPLLEAFGNAKTVRNNNSSRFGKFVEIHFNEKSSVVGGFVSHYLLEKSRICVQGKEERNHHIFYRLCAGASEDIREKLHLSSPDNFRYLNRGCTRFFANKETDKQILQNRKSPEYVKAGSLEGSSIRRPWRFYQDVHSHEKNWFGMMKKNFDLFRVVAGVLHLGNIDLEEAGSTSGGCNLKNKSAPSLEYCAELLGLDQDDLRVSLTTRVMLTTAGGTKGTVIKVPLKVEQANNARDALAKTVYSHLFDHVVNRVNQCFPFETSSYFIGVLDIAGFEYFEHNSFEQFCINYCNEKLQQFFNERILKEEQELYQKEGLGVNEVHYVDNQDCIELIEVKLVGILDILDEENRLPQPSDQHFTSVVHQKHKDHFRLTIPRKSKLAVHRNLRDDEGFIIRQLCRGRVLRRQPQYGGGKNNDALHMSLESLICESRDKFIRALFESSTNNSKDTKQKAGKLSFISVGNKFKTQLNLLLDKLRSTGASFIRCIKPNLKMASHHFEGAQILSQLQCSGMVSVLDLMQGGFPSRASFHELYNMYKKYMPEKLPRLDPRLFCKPLFKALGLNEVDYKFGLTQVFFRPGKFAEFDQIMKSDPDHLAELVKRVNLWLVCSRWKKVQWCSLSVIKLKNKIKYRAEACIKMQKPIRMWLCKRRHNPRIDGLVKVGTLKKRLDKFNEVVSALKDGKPEVNRQIKNLEISIDALMAKFTSTMMTREQIQKEYDALVKSSEDLLSALQKKKQQEEEAERLRRIQEEMEKERKRREEDEERRRKEEEERRMKLEMEPKRKQEEEERKKREDDEKRIQSEVEAQLARQREEESQQQAVLAQECRDRELALRIAQNESELISDEAQGDMALRRGPAVQATKAASGTKKHDLSKWKYAELRDTINTSCDIELLAACREEFHRRLKVYHAWKSKNKKRNTETEQRAPKSVTDYDFAPFLNNSPQQNPAAQLPARQQEIDMKRQQRFFRIPFIRPADQYKDPQNKKKGWWYAHFDGPWIARQMELHPDKPPILLVAGKDDMEMCELNLEETGLTRKRGAEILPRQFEEIWERCGGIQYLQSAIESRQARPTYATAMLQNLLK

SEQ ID NO: 526 - protein, 565 aa, Mus musculus
MALPSPASEEAEGPCQEANQEYQEPVCSPVPEPEPEPEPEPEPDPEPVPVPPPEPQPEPEPQPLPDPAPLPELGFEAEPEPQPLPDPAPLPELGFEAEPVQEPEPTPTVETRGTARGFQPPEGGFGWIVVFAATWCNGSIFGIHNSVGILYSMLLEEEKEKNRQVEFQAAWVGALAMGMIFFCSPIVSIFTDRLGCRITATTGAAVAFIGLHTSSFTSSLSLRYFTYGILFGCGCSFAFQPSLVILDHYFQRRLGLANGVVSAGSSIFSMSFPFLIKMLGDKIKLAQTFQVLSTFMFVLTLLSLTYRPLLPSSQDTPSKRGAHTLRQRFLVQFRKYFNMRVFRQRTYRIWAFGIAAAALGYFVPYVHLMKYVEDKFKEIKETWVLLVCIGATSGLGRLVSGHISDSIPGLKKIYLQVLSFLLLGLMSMMIPLCRDFGGLIVVCLFLGLCDGFFITIMAPIAFELVGPMQASQAIGYLLGMMALPMIAGPPIAGLLRNCFGDYHVAFYFAGVPPIIGAVILFFVPLMHQRMFKKEQRDSSKDKMLSHDPDPNGELLPGSPTPEEPI

SEQ ID NO: 527 - protein, 548 aa, Mus musculus
MVPKADSGAFLLLFLLVLTVTEPLRPELRCNPGQFACHGGTIQCIPLPWQCDGWPTCEDKSDEADCPVTGEARPYGKETVDLRQGRARGGDPTHFHTVNVAQPVRFSSFLGKCPSGWHHYEGTASCYRVYLSGENYWDAAQTCQRVNGSLATFSTDQELRFVLAQEWDQPERSFGWKDQRKLWVGYQYVITGRNHSLEGRWEVAFKGSPEVFLPPDPIFASAMSENDNVFCAQLQCFHFPTLRHHDLHSWHAESCSEKSSFLCKRSQTCVDIKDNVVDEGFYFTPKGDDPCLSCTCHRGEPEMCVAALCERPQGCQQYRKDPKECCKFMCLDPDGSSLFDSMASGMRLVVSCISSFLILSLLLFMVHRLAQRRRERIESLIGANLHHFNLGRRIPGFDYGPDGFGTGLTPLHLSDDGEGGTFHFHDPPPPYTAYKYPDMDQPDDPPPPYEASINPDSVFYDPADDDAFEPVEASLPAPRDGGIEGALPRHLDQPLPPAETSLADLEDSTDSSSALLVPPDPAQSGSTPATEAPPGGGRLPRASLNTVV

SEQ ID NO: 528 - protein, 239 aa, Mus musculus
MAYQSLRLEYLQIPPVSRAYTTACVLTTAAVQLELITPFQLYFNPELIFKHFQIWRLITNFLFFGPVGFNFLFNMIFLYRYCRMLEEGSFRGRTADFVFMFLFGGFLMTLFGLFVSLVFLGQAFTIMLVYVWSRRNPYVRMNFFGLLNFQAPFLPWVLMGFSLLLGNSIIVDLLGIAVGHIYFFLEDIFPNQPGGIRILKTPSILRTIFDTPDEDPNYNPLPEERPGGFAWGEGQRLGG

SEQ ID NO: 529 - protein, 704 aa, Mus musculus
MITLCLSALRGLHRAGGSRIRLRMTLGREAASPLQAMSSYTAAGRNVLRWDLSPEQIRTRTEELIAQTKQVYDTVGTINLEDVTYENCLQVLADIEVKYIVERTMLDFPQHVSSDREVRAASTEADKRLSRFDIEMSMREDVFQRIVHLQETCDLEKIKPEARRYLEKSIKMGKRNGLHLPEHVKNEIKSMKKRMSELCIDFNKNLNEDDTSLVFSKAELGALPDDFIDSLEKTDEDKYKVTLKYPHYFPVMKKCCVPETRRKMEMAFHTRCKEENTIILQQLLPLRAQVAKLLGYNTHADFVLELNTAKSTSHVATFLDDLSQKLKPLGEAEREFILSLKKKECEERGFAYDGKINAWDLHYYMTQTEELKYSVDQESLKEYFPIEVVTEGLLSIYQELLGLSFEQVADAHVWNKSVSLYTVKDKATGEVLGQFYLDLYPREGKYNHAACFGLQPGCLLPDGSRMMSVAALVVNFSQPIAGRPSLLRHDEVRTYFHEFGHVMHQICAQTDFARFSGTNVETDFVEVPSQMLENWVWDIDSLRKLSKHYRDGHPITDELLEKLVASRLVNTGLLTLRQIVLSKVDQSLHTNASLDAASEYAKYCTEILGVAATPGTNMPATFGHLAGGYDGQYYGYLWSEVFSMDMFHSCFRKEGIMNPEVGMKYRNLILKPGGSLDGMDMLQNFLQREPNQKAFLMSRGLNAS

SEQ ID NO: 530 - protein, 248 aa, Mus musculus
MSSAAMSKYVNDMWPGSPQEKASPSTSGSGRSSRLSSRSRSRSSSRSSRRDSRSSSRSSSRSHSRPRRSRRSRSRSRRRHQRKYRRYSRSYSRSRSRSRSHRYHRDSRYERPRRYYKSPSPYRSRSRSRSRGRSQHRWSYYAITRGRRYYGFGRTVYPEDRPRWRERSRTRSRSRSRTPFRLSEKDRMELLEIAKANAAKALGTANFDLPASLRAKEASQGTAVSSSGPKVEVSAFRKLLPAFITLCQ

SEQ ID NO: 531 - protein, 421 aa, Mus musculus [sequence omitted]

SEQ ID NO: 532 - protein, 1085 aa, Mus musculus
MPHFTVVPVDGPRRGDYDNLEGLSWVDYGERAEREDSDGQGNHRENSPFLCPLDASRGNDYYDRNLALFEEELDIRPKVSSLLGKLVSYTNLTQGAKEHEEAESGEGGRRRAAKAPSMGTLMGVYLPCLQNIFGVILFLRLTWMVGTAGVLQALLIVLICCCCTLLTAISMSAIATNGVVPAGGSYFMISRSLGPEFGGAVGLCFYLGTTFAAAMYILGAIEILLTYIAPPAAIFYPSGTHDMSSATLNNMRVYGTIFLTLMTLVVFVGVKYVNKFASLFLACVIISILSIYAGGIKSIFDPPVFPVCMLGNRTLSRDQFDICAKTVVVDNETVATRLWTFFCHSPNLTADSCDPYFLLNNVTEIPGIPGAAAGVLQENLWSAYLEKGEVVEKHGLPSTDTLGLKESLSLYVVADIATSFTVLVGIFFPSVTGIMAGSNRSGDLRDAQKSIPVGTILAIVTTSLVYFSSVILFGACIEGVVLRDKYGDGVSRNLVVGTLAWPSPWVIVVGSFFSTCGAGLQSLTGAPRLLQAIAKDNIIPFLRVFGHGKANGEPTWALLLTALIAELGILIASLDMVAPILSMFFLMCYLFVNLACAVQTLLRTPNWRPRFKYYHWTLSFLGMSLCLALMFVSSWYYALVAMLIAGMIYKYIEYQGAEKEWGDGIRGLSLSAARYALLRLEEGPPHTKNWRPQLLVLLKLDEDLHVKYPRLLTFASQLKAGKGLTIVGSVIQGSFLESYGEAQAAEQTIKNMMDIEKVKGFCQVVVASKVREGLAHLIQSCGLGGMRHNSVVLGWPYGWRQSEDPRAWKTFIDTVRCTTAAHLALLVPKNIAFYPSNHERYLDGHIDVWWIVHDGGMLMLLPFLLRQHKVWKKCRMRIFTVAQMDDNSIQMKKDLAIFLYHLRLEAEVEVVEMHNSDISAYTYERTLMMEQRSQMLRQMRLTKTERDREAQLVKDRHSALRLESLYSDEEEESVAGADKIQMTWTRDKYMAEPWDPSHAPDNFRELVHIKPDQSNVRRMHTAVKLNEVIVTRSHDARLVLLNMPGPPKNSEGDENYMEFLEVLTEGLERVLLVRGGGREVITIYS

SEQ ID NO: 533 - protein, 2715 aa, Mus musculus
MDVKERRPYCSLTKSRREKERRYTNSSADNEECRVPTQKSYSSSETLKAFDHDYSRLLYGNRVKDLVHREADEYTRQGQNFTLRQLGVCESATRRGVAFCAEMGLPHRGYSISAGSDADTENEAVMSPEHAMRLWGRGVKSGRSSCLSSRSNSALTLTDTEHENRSDSESEQPSNNPGQPTLQPLPPSHKQHPAQHHPSITSLNRNSLTNRRNQSPAPPAALPAELQTTPESVQLQDSWVLGSNVPLESRHFLFKTGTGTTPLFSTATPGYTMASGSVYSPPTRPLPRNTLSRSAFKFKKSSKYCSWRCTALCAVGVSVLLAILLSYFIAMHLFGLNWHLQQTENDTFENGKVNSDTVPTNTVSLPSGDNGKLGGFTHENNTIDSGELDIGRRAIQEVPPGIFWRSQLFIDQPQFLKFNISLQKDALIGVYGRKGLPPSHTQYDFVELLDGSRLIAREQRNLVESERAGRQARSVSLHEAGFIQYLDSGIWHLAFYNDGKNPEQVSFNTIVIESVVECPRNCHGNGECVSGTCHCFPGFLGPDCSRAACPVLCSGNGQYSKGRCLCFSGWKGTECDVPTTQCIDPQCGGRGICIMGSCACNSGYKGENCEEADCLDPGCSNHGVCIHGECHCNPGWGGSNCEILKTMCADQCSGHGTYLQESGSCTCDPNWTGPDCSNEICSVDCGSHGVCMGGSCRCEEGWTGPACNQRACHPRCAEHGTCKDGKCECSQGWNGEHCTIAHYLDKIVKEGCPGLCNSNGRCTLDQNGWHCVCQPGWRGAGCDVAMETLCTDSKDNEGDGLIDCMDPDCCLQSSCQNQPYCRGLPDPQDIISQSLQTPSQQAAKSFYDRISFLIGSDSTHVLPGESPFNKSLASVIRGQVLTADGTPLIGVNVSFLHYSEYGYTITRQDGMFDLVANGGASLTLVFERSPFLTQYHTVWIPWNVFYVMDTLVMKKEENDIPSCDLSGFVRPSPIIVSSPLSTFFRSSPEDSPIIPETQVLHEETTIPGTDLKLSYLSSRAAGYKSVLKITMTQAVIPFNLMKVHLMVAVVGRLFQKWFPASPNLAYTFIWDKTDAYNQKVYGLSEAVVSVGYEYESCLDLTLWEKRTAVLQGYELDASNMGGWTLDKHHVLDVQNGILYKGNGENQFISQQPPVVSSIMGNGRRRSISCPSCNGQADGNKLLAPVALACGIDGSLYVGDFNYVRRIFPSGNVTSVLELRNKDFRHSSNPAHRYYLATDPVTGDLYVSDTNTRRIYRPKSLTGAKDLTKNAEVVAGTGEQCLPFDEARCGDGGKAVEATLMSPKGMAIDKNGLIYFVDGTMIRKVDQNGIISTLLGSNDLTSARPLTCDTSMHISQVRLEWPTDLAINPMDNSIYVLDNNVVLQITENRQVRIAAGRPMHCQVPGVEYPVGKHAVQTTLESATAIAVSYSGVLYITETDEKKINRIRQVTTDGEISLVAGIPSECDCKNDANCDCYQSGDGYAKDAKLNAPSSLAASPDGTLYIADLGNIRIRAVSKNKPLLNSMNFYEVASPTDQELYIFDINGTHQYTVSLVTGDYLYNFSYSNDNDVTAVTDSNGNTLRIRRDPNRMPVRVVSPDNQVIWLTIGTNGCLKSMTAQGLELVLFTYHGNSGLLATKSDETGWTTFFDYDSEGRLTNVTFPTGVVTNLHGDMDKAITVDIESSSREEDVSITSNLSSIDSFYTMVQDQLRNSYQIGYDGSLRIFYASGLDSHYQTEPHVLAGTANPTVAKRNMTLPGENGQNLVEWRFRKEQAQGKVNVFGRKLRVNGRNLLSVDFDRTTKTEKIYDDHRKFLLRIAYDTSGHPTLWLPSSKLMAVNVTYSSTGQIASIQRGTTSEKVDYDSQGRIVSRVFADGKTWSYTYLEKSMVLLLHSQRQYIFEYDMWDRLSAITMPSVARHTMQTIRSIGYYRNIYNPPESNASIITDYNEEGLLLQTAFLGTSRRVLFKYRRQTRLSEILYDSTRVSFTYDETAGVLKTVNLQSDGFICTIRYRQIGPLIDRQIFRFSEDGMVNARFDYSYDNSFRVTSMQGVINETPLPIDLYQFDDISGKVEQFGKFGVIYYDINQIISTAVMTYTKHFDAHGRIKEIQYEIFRSLMYWITIQYDNMGRVTKREIKIGPFANTTKYAYEYDVDGQLQTVYLNEKIMWRYNYDLNGNLHLLNPSSSARLTPLRYDLRDRITRLGDVQYRLDEDGFLRQRGTEIFEYSSKGLLTRVYSKGSGWTVIYRYDGLGRRVSSKTSLGQHLQFFYADLTYPTRITHVYNHSSSEITSLYYDLQGHLFAMEISSGDEFYIASDNTGTPLAVFSSNGLMLKQTQYTAYGEIYFDSNVDFQLVIGFHGGLYDPLTKLIHFGERDYDILAGRWTTPDIEIWKRIGKDPAPFNLYMFRNNNPASKIHDVKDYITDVNSWLVTFGFHLHNAIPGFPVPKFDLTEPSYELVKSQQWEDVPPIFGVQQQVARQAKAFLSLGKMAEVQVSRRKAGAEQSWLWFATVKSLIGKGVMLAVSQGRVQTNVLNIANEDCIKVAAVLNNAFYLENLHFTIEGKDTHYFIKTTTPESDLGTLRLTSGRKALENGINVTVSQSTTVVNGRTRRFADVEMQFGALALHVRYGMTLDEEKARILEQARQRALARAWAREQQRVRDGEEGARLWTEGEKRQLLSAGKVQGYDGYYVLSVEQYPELADSANNIQFLRQSEIGKR

SEQ ID NO: 534 - protein, 295 aa, Mus musculus
MTLNNVTMRQGTVGMQPQQRWSIPADARHLMVQKDPHPCNLRNRHSTAPEEHCRRSWSSDSTDSVISSESGNTYYRVVLIGEQGVGKSTLANIFAGVHDSMDSDCEVLGEDTYERTLVVDGESATIILLDMWENKGENEWLHDHCMQVGDAYLIVYSITDRASFEKASELRIQLRRARQTEDIPIILVGNKSDLVRCREVSVSEGRACAVVFDCKFIETSAAVQHNVKELFEGIVRQVRLRRDSKEKNERRLAYQKRRESIPRKARRFWGKIVAKNNKNMAFKLKSKSCHDLSWL

SEQ ID NO: 535 - protein, 175 aa, Mus musculus
MDIAIHHPWIRRPFFPFHSPSRLFDQFFGEHLLESDLFSTATSLSPFYLRPPSFLRAPSWIDTGLSEMRLEKDRFSVNLDVKHFSPEELKVKVLGDVIEVHGKHEERQDEHGFISREFHRKYRIPADVDPLTITSSLSSDGVLTVNGPRKQVSGPERTIPITREEKPAVAAAPKK

SEQ ID NO: 536 - protein, 378 aa, Mus musculus
MATTHAQGHQPVLGNDTLREHYDYVGKLAGRLRDPPEGGTLITTILFLVTCSFIVLENLMVLIAIWKNNKFHNRMYFFIGNLALCDLLAGIAYKVNILMSGRKTFSLSPTVWFLREGSMFVALGASTCSLLAIAIERHLTMIKMRPYDANKKHRVFLLIGMCWLIAFSLGALPILGWNCLENFPDCSTILPLYSKKYIAFLISIFTAILVTIVILYARIYCLVKSSSRRVANHNSERSMALLRTVVIVVSVFIACWSPLFILFLIDVACRAKECSILFKSQWFIMLAVLNSAMNPVIYTLASKEMRRAFFRLVCGCLVKGKGTQASPMQPALDPSRSKSSSSNNSSHSPKVKEDLPRVATSSCIIDKNRSFQNGVLCK

SEQ ID NO: 537 - protein, 282 aa, Mus musculus
MALKQISSNRCFGGLQKVFEHSSVELKCKMRFAVYLPPQAESGKCPALYWLSGLTCTEQNFISKSGYQQAASEHGLVVIAPDTSPRGCNIKGEDDSWDFGTGAGFYVNATEDPWKANYRMYSYVTEELPQLINANFPVDPQRMSIFGHSMGGHGALICALKNPGKYRSVSAFAPICNPVLCSWGKKAFSGYLGPDESKWKAYDATCLVKAYSGSQIDILIDQGKDDEFLSNGQLLPDNFIAACTEKKIPVVFRLQEGYDHSYYFIATFIADHIRHHAKYLNA

SEQ ID NO: 538 - protein, 381 aa, Mus musculus
MHLPAILLCALWSAVVAETSDDYELMYVNLDNEIDNGLHPTEDPTPCDCRQEHSEWDKLFIMLENSQMREGMLLQATDDVLRGELQRLRAELGRLAGGMARPCAAGGPADARLVRALEPLLQESRDASRRLARLEDAEARRSEATVSGLGAVLEELRRTRADLSAVQSWVARHWLPAGCETAILFPMRSKKIFGSVHPVRPMKLESFSTCIWVKATDVLNKTILFSYGTKWNPYEIQLYLSSQSLVLVVGGKENKLAADTVVSLGRWSHLCGTWSSEQGSMSLWANGELVATTVEMAKSHSVPEGGLLQIGQEKNGCCVGGGFDESLAFSGRITGFNIWDRVLSEEEIRASGGVESCHIRGNVVGWGVTEIQAHGGAQYVS

SEQ ID NO: 539 - protein, 419 aa, Mus musculus
MAARRTHERDPIYKIKGLAKDMLDGVFDDLVEKNVLNGDELLKIGESASFILNKAENLVENFLEKTDMAGKIFAGHIANSQEQLSLQFSNDEDDGPQKICTPSSPSESKRKVEDDEMEVNAGLAHESHLMLTAPHGLQSSEVQDTLKLCPRDQFCKIKTERAKEIYPVMEKEGRTRLALIICNKKFDYLFDRDNADTDILNMQELLENLGYSVVLKENLTAQEMETELMQFAGRPEHQSSDSTFLVFMSHGILEGICGVKHRNKKPDVLHDDTIFKIFNNSNCRSLRNKPKILIMQACRGRYNGTIWVSTNKGIATADTDEERVLSCKWNNSITKAHVETDFIAFKSSTPHNISWKVGKTGSLFISKLVDCFKKYCWCYHLEEIFRKVQHSFEVPGELTQMPTIERVSMTRYFYLFPGN

SEQ ID NO: 540 - protein, 739 aa, Mus musculus
MPVKMVAVLGASTVLWILFAVSQAFKIEISPEYKTIAQIGDSMALTCSTTGCESPLFSWRTQIDSPLNAKVRTEGSKSVLTMEPVSFENEHSYLCTATCGSGKLERSIHVDIYSFPKDPEIQFSGPLEVGKPVTVKCLAPDIYPVYRLEIDLFKGDQLMNRQEFSSEEMTKSLETKSLEVTFTPVIEDIGKALVCRAKLHIDQIDSTLKERETVKELQVYISPRNTTISVHPSTRLQEGGAVTMTCSSEGLPAPEIFWGRKLDNEVLQLLSGNAILTLIAMRMEDSGVYVCEGVNLIGRDKAEVELVVQEKPFIVDISPGSQVAAQVGDSVVLTCAAIGCDSPSFSWRTQTDSPLNGVVRNEGAKSTLVLSSVGFEDEHSYLCAVTCLQRTLEKRTQVEVYSFPEDPVIKMSGPLVHGRPVTVNCTVPNVYPFDHLEIELLKGETTLMKKYFLEEMGIKSLETKILETTFIPTIEDTGKSLVCLARLHSGEMESEPKQRQSVQPLYVNVAPKETTIWVSPSPILEEGSPVNLTCSSDGIPAPKILWSRQLNNGELQPLSENTTLTFMSTKRDDSGIYVCEGINEAGISRKSVELIIQVSPKDIQLTVFPSKSVKEGDTVIISCTCGNVPETWIILKKKAKTGDMVLKSVDGSYTIRQAQLQDAGIYECESKTEVGSQLRSLTLDVKGKEHNKDYFSPELLALYCASSLVIPAIGMIVYFARKANMKGSYSLVEAQKSKV

SEQ ID NO: 541 - protein, 558 aa, Mus musculus
MYRRLGEALLLSRAGPAALGSAAADSAALLGWARGQPSAAPQPGLTPVARRHYSEAAADREDDPNFFKMVEGFFDRGASIVEDKLVEDLKTRESEEQKRNRVRGILRIIKPCNHVLSLSFPIRRDDGSWEVIEGYRAQHSQHRTPCKGGIRYSTDVSVDEVKALASLMTYKCAVVDVPFGGAKAGVKINPKNYTDNELEKITRRFTMELAKKGFIGPGIDVPAPDMSTGEREMSWIADTYASTIGHYDINAHACVTGKPISQGGIHGRISATGRGVFHGIENFINEASYMSILGMTPGFGDKTFVVQGFGNVGLHSMRYLHRFGAKCVGVGESDGSIWNPDGIDPKELEDFKLQHGSILGFPKAKVYEGSILEADCDILIPAASEKQLTKSNAPRVKAKIIAEGANGPTTPEADKIFLERNIMVIPDLYLNAGGVTVSYFEWLKNLNHVSYGRLTFKYERDSNYHLLMSVQESLERKFGKHGGTIPVVPTAEFQDRISGASEKDIVHSGLAYTMERSARQIMRTAMKYNLGLDLRTAAYVNAIEKVFKVYNEAGVTFT

SEQ ID NO: 542 - protein, 416 aa, Mus musculus
MEFVKCLGHPEEFYNLLRFRMGGRRNFIPKMDQDSLSSSLKTCYKYLNQTSRSFAAVIQALDGDIRHAICVFYLVLRALDTVEDDMSISVEKKIPLLCNFHTFLYDPEWRFTESKEKDRQVLEDFPTISLEFRNLAEKYQTVIDDICHRMGCGMAEFVDKDVTSKQDWDKYCHYVAGLVGIGLSRLFSASEFEDPIVGEDIECANSMGLFLQKTNIIRDYLEDQQEGRKFWPQEVWGRYIKKLEDFAKPENVDVAVQCLNELITNTLQHIPDVLTYLSRLRNQSVFNFCAIPQVMAIATLAACYNNQQVFKGVVKIRKGQAVTLMMDATNMPAVKAIIYQYIEEIYHRIPNSDPSSSKTKQVISKIRTQNLPNCQLISRSHYSPIYLSFIMLLAALSWQYLSTLSQVTEDYVQREH

SEQ ID NO: 543 - protein, 306 aa, Mus musculus
MASSGSVQQLPLVLLMLLLASAARARLYFRSGQTCYHPIRGDQLALLGRRTYPRPHEYLSPADLPKNWDWRNVNGVNYASVTRNQHIPQYCGSCWAHGSTSAMADRINIKRKGAWPSILLSVQNVIDCGNAGSCEGGNDLPVWEYAHKHGIPDETCNNYQAKDQDCDKFNQCGTCTEFKECHTIQNYTLWRVGDYGSLSGREKMMAEIYANGPISCGIMATEMMSNYTGGIYAEHQDQAVINHIISVAGWGVSNDGIEYWIVRNSWGEPWGEKGWMRIVTSTYKGGTGDSYNLAIESACTFGDPIV

SEQ ID NO: 544 - protein, 297 aa, Mus musculus
MGTTLDIKIKRANKVYHAGEMLSGVVVISSKDSVQHQGVSLTMEGTVNLQLSAKSVGVFEAFYNSVKPIQIINSTIDVLKPGKIPSGKTEVPFEFPLLVKGSKVLYETYHGVFVNIQYTLRCDMRRSLLAKDLTKTCEFIVHSAPQKGKLTPSPVDFTITPETLQNVKERASLPKFFIRGHLNSTNCAITQPLTGELVVEHSDAAIRSIELQLVRVETCGCAEGYARDATEIQNIQIADGDICRNLSVPLYMVFPRLFTCPTLETTNFKVEFEVNVVVLLHADHLITENFPLKLCRT

SEQ ID NO: 545 - protein, 97 aa, Mus musculus
MPSQMEHAMETMMLTFHRFAGDKDHLTKEDLRVLMEREFPGFLENQKDPLAVDKIMKDLDQCRDGKVGFQSFLSLVAGLTIACNDYFVVNMKQKGKK

SEQ ID NO: 546 - protein, 597 aa, Mus musculus
MMDLELPPPGLQSQQDMDLIDILWRQDIDLGVSREVFDFSQRQKDYELEKQKKLEKERQEQLQKEQEKAFFAQFQLDEETGEFLPIQPAQHIQTDTSGSASYSQVAHIPKQDALYFEDCMQLLAETFPFVDDHESLALDIPSHAESSVFTAPHQAQSLNSSLEAAMTDLSSIEQDMEQVWQELFSIPELQCLNTENKQLADTTAVPSPEATLTEMDSNYHFYSSISSLEKEVGNCGPHFLHGFEDSFSSILSTDDASQLTSLDSNPTLNTDFGDEFYSAFIAEPSDGGSMPSSAAISQSLSELLDGTIEGCDLSLCKAFNPKHAEGTMEFNDSDSGISLNTSPSRASPEHSVESSIYGDPPPGFSDSEMEELDSAPGSVKQNGPKAQPAHSPGDTVQPLSPAQGHSAPMRESQCENTTKKEVPVSPGHQKAPFTKDKHSSRLEAHLTRDELRAKALHIPFPVEKIINLPVDDFNEMMSKEQFNEAQLALIRDIRRRGKNKVAAQNCRKRKLENIVELEQDLGHLKDEREKLLREKGENDRNLHLLKRRLSTLYLEVFSMLRDEDGKPYSPSEYSLQQTRDGNVFLVPKSKKPDTKKN

SEQ ID NO: 547 - protein, 208 aa, Mus musculus
MKLLPSVMLKLFLAAVLSALVTGESLERLRRGLAAATSNPDPPTGSTNQLLPTGGDRAQGVQDLEGTDLNLFKVAFSSKPQGLATPSKERNGKKKKKGKGLGKKRDPCLRKYKDYCIHGECRYLQEFRTPSCKCLPGYHGHRCHGLTLPVENPLYTYDHTTVLAVVAVVLSSVCLLVIVGLLMFRYHRRGGYDLESEEKVKLGVASSH

SEQ ID NO: 548 - protein, 119 aa, Mus musculus
MKALSPVRGCYEAVCCLSERSLAIARGRGKSPSTEEPLSLLDDMNHCYSRLRELVPGVPRGTQLSQVEILQRVIDYILDLQVVLAEPAPGPPDGPHLPIQTAELTPELVISKDKRSFCH

SEQ ID NO: 549 - protein, 509 aa, Mus musculus
MYSPLCLTQDEFHPFIEALLPHVRAFAYTWFNLQARKRKYFKKHEKRMSKEEERAVKDELLSEKPEVKQKWASRLLAKLRKDIRPEYREDFVLTVTGKKPPCCVLSNPDQKGKMRRIDCLRQADKVWRLDLVMVILFKGIPLESTDGERLVKSPQCSNPGLCVQPHHIGVSVKELDLYLAYFVHAADSSQSESPSQPSEADIKDQPENGHLGFQDSFVTSGVFSVTELVRVSQTPIAAGTGPNFSLSDLESSSYYSMSPGAMRRSLPSTSSTSSTKRLKSVEDEMDSPGEEPFYTGQGRSPGSGSQSSGWHEVEPGLPSPSTLKKSEKSGFSSPSPSQTSSLGTAFTQHHRPVITGPRASPHATPSTLHFPTSPIIQQPGPYFSHPAIRYHPQETLKEFVQLVCPDAGQQAGQVGFLNPNGSSQGKVHNPFLPTPMLPPPPPPPMARPVPLPMPDTKPPTTSTEGGAASPTSPTYSTPSTSPANRFVSVGPRDPSFVNIPQQTQSWYLG

SEQ ID NO: 550 - protein, 155 aa, Mus musculus
MADLRQLMDNEVLMAFTSYATIILTKMMFMSSATAFQRITNKVFANPEDCAGFGKGENAKKFVRTDEKVERVRRAHLNDLENIVPFLGIGLLYSLSGPDLSTALMHFRIFVGARIYHTIAYLTPLPQPNRGLAFFVGYGVTLSMAYRLLRSRLYL

SEQ ID NO: 551 - protein, 1062 aa, Mus musculus
  MOD_RES (508)..(508): Variable amino acid
MKFLLLSTFIFLYSSLALARDKHYFIGITEAVWDYASGTEEKKLISVDTEQSNFYLQNGPDRIGRKYKKALYFEYTDGTFSKTIDKPAWLGFLGPVIKAEVEDKVYVHLKNLASRIYTFHAHGVTYTKEYEGAVYPDNTTDFQRADDKVLPGQQYVYVLHANEPSPGEGDSNCVTRIYHSHVDAPKDIASGLIGPLILCKKGSLYKEKEKNIDQEFVLMFSVVDENLSWYLEDNIKTFCSEPEKVDKDNEDFQESNRMYSINGYTFGSLPGLSMCAADRVKWYLFGMGNEVDVHSAFFHGQALTSRNYQTDIINLFPATLIDAYMVAQNPGVWMLSCQNLNHLKAGLQAFFQVQDCNKPSSKDNIRGKHVRHYYIAAEEVIWNYAPSGIDIFTEEKLTASGSDSGVFFEQGATRIGGSYKKMAYREYTDGSFTNRKERGPDEEHLGILGPVIWAEVGDTIKVTFHNKGQHHLSIQPMGVSFTAENEGTYYGPPGASSQQAASHVAPKXTFTYEWTVPKEMGPTYADPVCLSKMYYSAVDPTKDIFTGLIGPMKICKKGSLLADGRQKDVDKEFYLFPTVFDENESLLLDDNIRMFTHAPDQVDKEDEDFQESNKMHSMNGFMYGNQSWPHMCLGESIVWYLFSAGNEADVHGIYFSGNTYLCKGEERDTANLFPHKSLTLLMNPDTKGTFDVECLTTDHYTGGMKQKYTVNQCQRQFEDFTVYLGERTYYVDAVEVEWDYSPSRAWEKELHHLQEQNVSNVFLDKEEFFIGSKYKKVVYRQFTDSSFREQVKRRAEEDEHLGILGPPIHANVGDKVKVVFKNMATRPYSIHAHGVKTESSTVVPTLPGEVATYTWQIPERSGAGREDSACIPWAYYSTVDRVKDLYSGLIGPLIVCRKSYVKVFSPKKKMEFFLLFLVFDENESWYLDDNIKTYSEHPEKVNKDNEEFLESNKMHAINGKMFGNLQGLTMHVKDEVNWYLMGMGNEIDLHTVHFHGHSFQYKHRGVYSSDVFDLFPGTYQTLEMFPQTPGTWLLHCHVTDHVHAGMATTYTVLPVEQETKSG

SEQ ID NO: 552 - protein, 1691 aa, Mus musculus
MQVRGVCLAAGWFLLALCLWGQPAEAAACHGCSSGSKCDCSGIKGEKGERGFPGLEGHPGLPGFPGPEGPPGPRGQKGDDGIPGPPGPKGIRGPPGLPGFPGTPGLPGMPGHDGAPGPQGIPGCNGTKGERGFPGSPGFPGLQGPPGPPGIPGMKGEPGSIIMSPLPGPKGNQGYPGPPGIQGPPGPKGISGPSGPPGPPGLMGPPGPPGPPGPKGNMGLNFQGPKGEKGEQGLQGPPGPPGQISEQKRPIDIEFQKGDQGVPGDRGPPGPPGIPGPPGPPGGVKGEKGEPGEAGKRGKPGKDGETGQPGIPGLPGDPGYPGEPGRDGEKGQKGDIGPPGPPGLVIPAPGTGVTMGEKGNIGLPGLPGEKGERGFPGIQGPPGFPGPPGTAVVGPPGPPGYPGERGQKGDEGPPGICIPGSPGLDGQPGAPGLPGPPGPPGPQLPSRDEICKAGPPGPPGPPGDKGLQGERGVKGDKGDTCFNCIGTGISGPPGQPGLPGLPGPPGSLGIPGEKGDKGQAGITGPKGLPGIPGPPGAPGFPGSKGDPGDVLTLPGMKGDKGELGFPGAPGLPGLPGSPGKDGLPGLPGPKGEPGGITFKGERGPPGSPGLPGLPGNMGPTGPVGFGPPGPIGEKGIQGVAGNPGQPGLPGPKGDPGQTITQPGKPGLPGSPGRDGEVGLPGDPGLPGQPGLPGILGSKGEPGIPGIGPPGPPGPKGFPGIPGPPGAPGAPGRMGPDGPPGPPGFPGPKGEPGFGLPGPPGPPGFPGFKGTPGPKGDRGFPGPSGPPGRTGLDGLPGPKGDVGPNGQPGPVGPPGLPGIGLQGPPGPPGTPGPIGQPGLHGIPGEKGDPGPPGFDVPGLPGERGSPGLPGAPGLIGPPGSPGVPGKAGVPGFPGVKGEMGMMGPPGPPGPLGIPGRSGAPGLKGDDGMQGQPGLPGPAGEKGGKGEPGLPGPPGPMHPDFLGSKGEKGEPGLPGIPGLSGPKGYQGLPGDPGQPGLSGQPGSPGLPGPKGNPGLPGPPGLTGPPGPKGNIGDMGFPGPQGVDGPPGPPGFPGQPGSPGLPGQKGSKGEPGVSGIGLPGLPGPKGEPGLPGYPGNPGIKGSVGETGLPGLPGNPGAKGQPGLPGFPGTPGLPGPKGMNGPPGNPGFPGEPGPVGAGGRPGPPGPPGEKGKPGQDGIPGPAGQKGEPGQPGFGIPGPPGLPGLSGQKGDGGSPGLPGNPGLPGSKGEPGFQGFPGMPGPPGPPGSPGQALEGPKGNPGPQGPPGRPGPPGFQGPPGTEGPRGPPGNGGIKGERGNPGPPGQPGLPGLKGDQGPPGLPGNPGRPGLNGMKGDPGLPGVPGFPGMKGPIGVPGSTGPDGEPGLTGPPGPPGLPGPSGQSIVIKGDPGPPGIPGQPGLKGLPGLPGPQGLPGPIGPPGDPGRNGLPGFDGAGGRKGDPGLPGQPGARGLDGPPGPDGLQGPPGPPGTTSVAHGFLITRHSQTTEAPQCPRGTVHIYEGFSLLYVQGNKRAHGQDLGTAGSCLRRFSTMPFMFCNINNVCNFASRNDYSYWLSTPEPMPMNMEPLKGQSIQPFISRCAVCEAPAVVIAVHSQTIQIPHCPQGWDSLWIGYSFMMHTSAGAEGSGQALASPGSCLEEFRSAPFIECHGRGTCNYYANSYSFWLATVDMSDMFNKPQSETLKAGDLRTRISRCQVCMKRT

SEQ ID NO: 553 - protein, 296 aa, Mus musculus
MHRLLAWDAACLPPPPAAFRPMEVANFYYEPDCLAYGAKAARAAPRAPAAEPAIGEHERAIDFSPYLEPLAPAADFAAPAPAHHDFLSDLFADDYGAKPSKKPADYGYVSLGRAGAKAAPPACFPPPPPAALKAEPGFEPADCKRADDAPAMAAGFPFALRAYLGYQATPSGSSGSLSTSSSSSPPGTPSPADAKAAPAACFAGPPAAPAKAKAKKTVDKLSDEYKMRRERNNIAVRKSRDKAKMRNLETQHKVLELTAENERLQKKVEQLSRELSTLRNLFKQLPEPLLASAGHC

SEQ ID NO: 554 - protein, 821 aa, Mus musculus
MVSWGRFICLVLVTMATLSLARPSFSLVEDTTLEPEEPPTKYQISQPEAYVVAPGESLELQCMLKDAAVISWTKDGVHLGPNNRTVLIGEYLQIKGATPRDSGLYACTAARTVDSETWIFMVNVTDAISSGDDEDDTDSSEDVVSENRSNQRAPYWTNTEKMEKRLHACPAANTVKFRCPAGGNPTSTMRWLKNGKEFKQEHRIGGYKVRNQHWSLIMESVVPSDKGNYTCLVENEYGSINHTYHLDVVERSPHRPILQAGLPANASTVVGGDVEFVCKVYSDAQPHIQWIKHVEKNGSKNGPDGLPYLKVLKAAGVNTTDKEIEVLYIRNVTFEDAGEYTCLAGNSIGISFHSAWLTVLPAPVREKEITASPDYLEIAIYCIGVFLIACMVVTVIFCRMKTTTKKPDFSSQPAVHKLTKRIPLRRQVTVSAESSSSMNSNTPLVRITTRLSSTADTPMLAGVSEYELPEDPKWEFPRDKLTLGKPLGEGCFGQVVMAEAVGIDKDKPKEAVTVAVKMLKDDATEKDLSDLVSEMEMMKMIGKHKNIINLLGACTQDGPLYVIVEYASKGNLREYLRARRPPGMEYSYDINRVPEEQMTFKDLVSCTYQLARGMEYLASQKCIHRDLAARNVLVTENNVMKIADFGLARDINNIDYYKKTTNGRLPVKWMAPEALFDRVYTHQSDVWSFGVLMWEIFTLGGSPYPGIPVEELFKLLKEGHRMDKPTNCTNELYMMMRDCWHAVPSQRPTFKQLVEDLDRILTLTTNEEYLDLTQPLEQYSPSYPDTSSSCSSGDDSVFSPDPMPYEPCLPQYPHINGSVKT

SEQ ID NO: 555 - protein, 379 aa, Mus musculus
MSSSTFRTLAVAVTLLHLTRLALSTCPAACHCPLEAPKCAPGVGLVRDGCGCCKVCAKQLNEDCSKTQPCDHTKGLECNFGASSTALKGICRAQSEGRPCEYNSRIYQNGESFQPNCKHQCTCIDGAVGCIPLCPQELSLPNLGCPNPRLVKVSGQCCEEWVCDEDSIKDSLDDQDDLLGLDASEVELTRNNELIAIGKGSSLKRLPVFGTEPRVLFNPLHAHGQKCIVQTTSWSQCSKSCGTGISTRVTNDNPECRLVKETRICEVRPCGQPVYSSLKKGKKCSKTKKSPEPVRFTYAGCSSVKKYRPKYCGSCVDGRCCTPLQTRTVKMRFRCEDGEMFSKNVMMIQSCKCNYNCPHPNEASFRLYSLFNDIHKFRD

SEQ ID NO: 556 - protein, 547 aa, Mus musculus
MPSVALKSPRLRRVFVVGVGMTKFMKPGGENSRDYPDMAKEAGQKALEDAQIPYSAVEQACVGYVYGDSTSGQRAIYHSLGLTGIPIINVNNNCSTGSTALFMAHQLIQGGLANCVLALGFEKMERGSIGTKFSDRTTPTDKHIEVLIDKYGLSAHPITPQMFGYAGKEHMEKYGTKVEHFAKIGWKNHKHSVNNTYSQFQDEYSLEEVMKSKPVFDFLTILQCCPTSDGAAAAILSSEEFVQQYGLQSKAVEIVAQEMMTDLPSTFEEKSIIKVVGYDMSKEAARRCYEKSGLTPNDVDVIELHDCFSVNELITYEALGLCPEGQGGTLVDRGDNTYGGKWVINPSGGLISKGHPLGATGLAQCAELCWQLRGEAGKRQVPGAKVALQHNLGLGGAVVVTLYRMGFPEAASSFRTHQVSAAPTSSAGDGFKANLVFKEIEKKLEEEGEQFVKKIGGIFAFKVKDGPGGKEATWVVDVKNGKGSVLPNSDKKADCTITMADSDLLALMTGKMNPQSAFFQGKLKIAGNMGLAMKLQNLQLQPGKAKL

SEQ ID NO: 557 - protein, 1134 aa, Mus musculus
MDELAFGEAALEQTLAEMCELDTAVLNDIEDMLQLINNQDSDFPGLFDAPYAGGETGDTGPSSPGANSPESFSSASLASSLEAFLGGPKVTPAPLSPPPSAPAALKMYPSVSPFSPGPGIKEEPVPLTILQPAAPQPSPGTLLPPSFPAPPVQLSPAPVLGYSSLPSGFSGTLPGNTQQPPSSLPLAPAPGVLPTPALHTQVQSLASQQPLPASAAPRTNTVTSQVQQVPVVLQPHFIKADSLLLTAVKTDAGATVKTAGISTLAPGTAVQAGPLQTLVSGGTILATVPLVVDTDKLPIHRLAAGSKALGSAQSRGEKRTAHNAIEKRYRSSINDKIVELKDLVVGTEAKLNKSAVLRKAIDYIRFLQHSNQKLKQENLTLRSAHKSKSLKDLVSACGSGGGTDVSMEGMKPEVVETLTPPPSDAGSPSQSSPLSFGSRASSSGGSDSEPDSPAFEDSQVKAQRLPSHSRGMLDRSRLALCVLAFLCLTCNPLASLFGWGILTPSDATGTHRSSGRSMLEAESRDGSNWTQWLLPPLVWLANGLLVLACLALLFVYGEPVTRPHSGPAVHFWRHRKQADLDLARGDFPQAAQQLWLALQALGRPLPTSNLDLACSLLWNLIRHLLQRLWVGRWLAGQAGGLLRDRGLRKDARASARDAAVVYHKLHQLHAMGKYTGGHLAASNLALSALNLAECAGDAISMATLAEIYVAAALRVKTSLPRALHFLTRFFLSSARQACLAQSGSVPLAMQWLCHPVGHRFFVDGDWAVHGAPPESLYSVAGNPVDPLAQVTRLFREHLLERALNCIAQPSPGAADGDREFSDALGYLQLLNSCSDAAGAPACSFSVSSSMAATTGPDPVAKWWASLTAVVIHWLRRDEEAAERLYPLVEHIPQVLQDTERPLPRAALYSFKAARALLDHRKVESSPASLAICEKASGYLRDSLASTPTGSSIDKAMQLLLCDLLLVARTSLWQRQQSPASVQVAHGTSNGPQASALELRGFQHDLSSLRRLAQSFRPAMRRVFLHEATARLMAGASPARTHQLLDRSLRRRAGSSGKGGTTAELEPRPTWREHTEALLLASCYLPPAFLSAPGQRMSMLAEAARTVEKLGDHRLLLDCQQMLLRLGGGTTVTSS

SEQ ID NO: 558 - protein, 589 aa, Mus musculus
MWVLMSWLAFAAGLVAGTQCPDGQFCPVACCLDQGGANYSCCNPLLDTWPRITSHHLDGSCQTHGHCPAGYSCLLTVSGTSSCCPFSKGVSCGDGYHCCPQGFHCSADGKSCFQMSDNPLGAVQCPGSQFECPDSATCCIMVDGSWGCCPMPQASCCEDRVHCCPHGASCDLVHTRCVSPTGTHTLLKKFPAQKTNRAVSLPFSVVCPDAKTQCPDDSTCCELPTGKYGCCPMPNAICCSDHLHCCPQDTVCDLIQSKCLSKNYTTDLLTKLPGYPVKEVKCDMEVSCPEGYTCCRLNTGAWGCCPFAKAVCCEDHIHCCPAGFQCHTEKGTCEMGILQVPWMKKVIAPLRLPDPQILKSDTPCDDFTRCPTNNTCCKLNSGDWGCCPIPEAVCCSDNQHCCPQGFTCLAQGYCQKGDTMVAGLEKIPARQTTPLQIGDIGCDQHTSCPVGQTCCPSLKGSWACCQLPHAVCCEDRQHCCPAGYTCNVKARTCEKDVDFIQPPVLLTLGPKVGNVECGEGHFCHDNQTCCKDSAGVWACCPYLKGVCCRDGRHCCPGGFHCSARGTKCLRKKIPRWDMFLRDPVPRPLL

SEQ ID NO: 559 - protein, 119 aa, Mus musculus
MARSVTLVFLVLVSLTGLYAIQKTPQIQVYSRHPPENGKPNILNCYVTQFHPPHIEIQMLKNGKKIPKVEMSDMSFSKDWSFYILAHTEFTPTETDTYACRVKHASMAEPKTVYWDRDM

SEQ ID NO: 560 - protein, 184 aa, Mus musculus
MAEPQPASSGLTDETAFSCCSDPDPSTKDFLLQQTMLRIKDPKKSLDFYTRVLGLTLLQKLDFPAMKFSLYFLAYEDKNDIPKDKSEKTAWMFSRKATLELTHNWGTEDDETQSYHNGNSDPRGFGHIGIAVPDVYSACKRFEELGVKFVKKPDDGKMKGLAFIQDPDGYWIEILNPNKIATII

SEQ ID NO: 561 - protein, 278 aa, Mus musculus
MFPFSGCWRTELLLLLLLAVAVRESWQIEEKSCDLVGEKDKESKNEVALLERLRPLFNKSFESTVGQGSDTYSYIFRVCREASNHSSGAGLVQINKSNDKETVVGRINETHIFNGSNWIMLIYKGGDEYDNHCGKEQRRAVVMISCNRHTLAANFNPVSEERGKVQDCFYLFEMDSSLACSPEVSHLSVGSILLVIFASLVAVYIIGGFLYQRLVVGAKGMEQFPHLAFWQDLGNLVADGCDFVCRSKPRNVPAAYRGVGDDQLGEESEERDDHLLPM

SEQ ID NO: 562 - protein, 393 aa, Mus musculus
MALKVAIAAGGAAKAMLKPTLLCRPWEVLAAHVAPRRSISSQQTIPPSAKYGGRHTVTMIPGDGIGPELMLHVKSVFRHACVPVDFEEVHVSSNADEEDIRNAIMAIRRNRVALKGNIETNHNLPPSHKSRNNILRTSLDLYANVIHCKSLPGVVTRHKDIDILIVRENTEGEYSSLEHESVAGVVESLKIITKAKSLRIAEYAFKLAQESGRKKVTAVHKANIMKLGDGLFLQCCREVAAHYPQITFDSMIVDNTTMQLVSRPQQFDVMVMPNLYGNIVNNVCAGLVGGPGLVAGANYGHVYAVFETATRNTGKSIANKNIANPTATLLASCMMLDHLKLHSYATSIRKAVLASMDNENMHTPDIGGQGTTSQAIQDIIRHIRIINGRAVEA

SEQ ID NO: 563 - protein, 89 aa, Mus musculus
MACPLDQAIGLLVAIFHKYSGKEGDKHTLSKKELKELIQKELTIGSKLQDAEIARLMDDLDRNKDQEVNFQEYVAFLGALALIYNEALK

SEQ ID NO: 564 - protein, 439 aa, Mus musculus
MLSKLASLQTIAALRRGVHTSVASATSVATKKTEQGPPSSEYIFERESKYGAHNYHPLPVALERGKGIYMWDVEGRQYFDFLSAYGAVSQGHCHPKIIDAMKSQVDKLTLTSRAFYNNVLGEYEEYITKLFNYNKVLPMNTGVEAGETACKLARRWGYTVKGIQKYKAKIVFADGNFWGRTLSAISSSTDPTSYDGFGPFMPGFETIPYNDLPALERALQDPNVAAFMVEPIQGEAGVIVPDPGYLTGVRELCTRHQVLFIADEIQTGLARTGRWLAVDHENVRPDMVLLGKALSGGLYPVSAVLCDDEIMLTIKPGEHGSTYGGNPLGCRIAIAALEVLEEENLAENADKMGAILRKELMKLPSDVVTSVRGKGLLNAIVIRETKDCDAWKVCLRLRDNGLLAKPTHGDIIRLAPPLVIKEDEIRESVEIINKTILSF

SEQ ID NO: 565 - protein, 298 aa, Mus musculus
MSLYPSLEDLKVDKVIQAQTAYSANPASQAFVLVDASAALPPDGNLYPKLYPELSQYMGLSLNEAEICESMPMVSGAPAQGLVARPSSVNYMVAPVTGNDAGIRRAEIKQGIREVILCKDQDGKIGLRLKSIDNGIFVQLVQANSPASLVGLRFGDQVLQINGENCAGWSSDKAHKVLKQAFGEKITMTIRDRPFERTVIMHKDSSGHVGFIFKSGKITSIVKDSSAARNGLLTDHHICEINGQNVIGLKDAQIADILSTAGTVVTITIMPTFIFEHIIKRMAPSIMKSLMDHTIPEV

SEQ ID NO: 566 - protein, 507 aa, Mus musculus
MQGATTLDAASPGPLALLGLLFAATLLLSALFLLTRRTRRPREPPLIKGWLPYLGMALKFFKDPLTFLKTLQRQHGDTFTVFLVGKYITFVLNPFQYQYVTKNPKQLSFQKFSSRLSAKAFSVKKLLTDDDLNEDVHRAYLLLQGKPLDALLETMIQEVKELFESQLLKITDWNTERIFAFCGSLVFEITFATLYGKILAGNKKQIISELRDDFFKFDDMFPYLVSDIPIQLLRNEESMQKKIIKCLTSEKVAQMQGQSKIVQESQDLLKRYYRHDDSEIGAHHLGFLWASLANTIPAMFWAMYYILRHPEAMEALRDEIDSFLQSTGQKKGPGISVHFTREQLDSLVCLESTILEVLRLCSYSSIIREVQEDMNLSLESKSFSLRKGDFVALFPPLIHNDPEIFDAPKEFRFDRFIEDGKKKSTFFKGGKRLKTYVMPFGLGTSKCPGRYFAVNEMKLLLIELLTYFDLEIIDRKPIGLNHSRMFLGIQHPDSAVSFRYKAKSWRS

SEQ ID NO: 567 - protein, 144 aa, Mus musculus
MSHNSQAFLSTNAGLPPSYETIKEEYGVTELGEPSNSAVVRTTVINMPREVSVPDHVVWSLFNTLFFNACCLGFVAYAYSVKSRDRKMVGDVVGAQAYASTAKCLNISSLIFSILMVIICIIIFSTTSVVVFQSFAQRTPHSGF

SEQ ID NO: 568 - protein, 134 aa, Mus musculus
MKAFSPVRSVRKNSLSDHSLGISRSKTPVDDPMSLLYNMNDCYSKLKELVPSIPQNKKVTKMEILQHVIDYILDLQIALDSHPTIVSLHHQRPGQNQASRTPLTTLNTDISILSLQASEFPSELMSNDSKVLCG

SEQ ID NO: 569 - protein, 570 aa, Mus musculus
MALGARGWRRRSLLLLLLWVTGQAAPVLGLAVSSELQIQQSFVPDECPRTVHSGDFVRYHYVGTFLDGQKFDSSYDRDSTFNVFVGKGQLIAGMDQALVGMCVNERRLVTIPPNLAYGSEGVSGVIPPNSVLHFDVLLVDIWNSEDQVHIQTYFKPPSCPRTIQVSDFVRYHYNGTFLDGTLFDSSHNRMKTYDTYVGIGWLIPGMDKGLLGMCVGEKRIITVPPFLAYGEEGNGEDIPGQASLVFDVALLDLHNPKDTISIENKVVPENCERRSQSGDFLRYHYNGTLLDGTLFDSSYSRNHTFDTYIGQGYVIPGMDEGLLGVCIGERRRIVVPPHLGYGEKGRGSIPASAVLVFDIHFIDVHNPSDSISITSHYNPPDCSVLIKKGDYLKYHYNASLLDGTLLDSTWNLGKTYNIVLGSGQVVLGMDMGLREMCVGEKRTVIIPPHLGYGEAGVDGEVPGSAVLVFDIELLDLVSGLPEGYMFIWNGEVSPNLFEEIDRDGNGEVLLEEFSEYIHAQVATGKGKLAPGFNAEMIVKNMFTNQDRNGNGKVTAEEFKLKDQEAKHDEL

SEQ ID NO: 570 - protein, 410 aa, Mus musculus
MKTPGVLLLILGLLASSSFAIIRIPLRKFTSIRRTMTEVGGSVEDLILKGPITKYSMQSSPKTTEPVSELLKNYLDAQYYGDIGIGTPPQCFTVVFDTGSSNLWVPSIHCKILDIACWVHHKYNSDKSSTYVKNGTSFDIHYGSGSLSGYLSQDTVSVPCKSDQSKARGIKVEKQIFGEATKQPGIVFVAAKFDGILGMGYPHISVNNVLPVFDNLMQQKLVDKNIFSFYLNRDPEGQPGGELMLGGTDSKYYHGELSYLNVTRKAYWQVHMDQLEVGNELTLCKGGCEAIVDTGTSLLVGPVEEVKELQKAIGAVPLIQGEYMIPCEKVSSLPTVYLKLGGKNYELHPDKYILKVSQGGKTICLSGFMGMDIPPPSGPLWILGDVFIGSYYTVFDRDNNRVGFANAVVL

SEQ ID NO: 571 - protein, 282 aa, Mus musculus
MQALPLVLYLSFFSLYSADLGPHQPRNLTWQVISGAGDTIWSLSKVTTPSTWWPDLFPDICKLAIGAPPGWDLEGYSDIQRAPSTPPPYVEKHPRDPWGGCSNQRDRSMLRIHPFYVCPGPHRSQSLNPKCGGKTDFFCKSWGCETSGEVYWKPSSSWDYIKVRANYSLESYVPGGFDLDECTDWCHPLRVTFTEPGKRALEWTKGYTWGLRLYKERYDEGLLFTIRLKIETPYNPLGPNKVLAPDEINPRPTPPSSSRPTPPPNSRGTVAPSKRITETVSL

SEQ ID NO: 572 - protein, 362 aa, Mus musculus
MDVHLFDYAEPGNYSDINWPCNSSDCIVVDTVQCPTMPNKNVLLYTLSFIYIFIFVIGMIANSVVVWVNIQAKTTGYDTHCYILNLAIADLWVVITIPVWVVSLVQHNQWPMGELTCKITHLIFSINLFGSIFFLACMSVDRYLSITYFTGTSSYKKKMVRRVVCILVWLLAFFVSLPDTYYLKTVTSASNNETYCRSFYPEHSIKEWLIGMELVSVILGFAVPFTIIAIFYFLLARAMSASGDQEKHSSRKIIFSYVVVFLVCWLPYHFVVLLDIFSILHYIPFTCQLENVLFTALHVTQCLSLVHCCVNPVLYSFINRNYRYELMKAFIFKYSAKTGLTKLIDASRVSETEYSALEQNTK

SEQ ID NO: 573 - protein, 152 aa, Mus musculus
MADSERLSAPGCWLACTSFSRTKKGILLFAEIILCLVILICFSASTTSAYSSLSVIEMICAAVLLVFYTCDLHSKISFINWPWTDFFRSLIATILYLITSIVVLVEGRGSSRVVAGILGLLATLLFGYDAYITFPLKQQRHTAAPTDPTDGP

SEQ ID NO: 574 - protein, 315 aa, Mus musculus
MVRGWRLLGVLMLSGLSSPGMSRPYNHGSERPIIGVVMQECFGKMAKLGNYYIAASYVKYIESAGARVVPIRPDLSDAEYEELFRSINGVLLPGGGANLTDSGYSRVAKIFFSKALESFDNGGHFPVWGTCLGFEELSVLVSGENLLTSTDTKSKKLPLNFTEGARKNKMFKHFPTELLDSLALENLTANFHKWSLSVKNFTENEKLKKFFNILTTNTDGKTEFISSMEGFKYPVYAVQWHPEKAPFEWKNLGGISHAPNAVKTSFYLAEFLVSEARKNSHHFENVVKETASLIYKVYPIYTGNISSFQQAYMFD

SEQ ID NO: 575 - protein, 567 aa, Mus musculus
MATGGYRSGGSTTTDFLEEWKAKREKMRAKQNPAGPGSSGGDPAAKSPAGSLTPTADECPSAAAASGAPGSRGDEEEPDSAREKGRSSGPSARKGKGQIEKRKLREKRRSTGVVNIPAAECLDEYEDDEAGQKERKREDAITQQNTIQNEAATLPDPGTSYLPQDPSRTVPGRYKSTTSAPEDEISNRYPRTDRSGFSRHNRDANAPASFSSSSTLEKRIEDLEKEVVRERQENLRLVRLMQDKEEMIGKLKEEIDLLNRDLDDMEDENEQLKQENKTLLKVVGQLTSLIELQVVPDGSPIVNTDNNNHGIVMAQRQPSFPQSHTSKLASDNFTIVGSPTIKHCVFGYPLDTEGNYSAPERQGLAAANPHIHESTTGFIRTAVRGARNYIESATAFATAFVTTRVAQENDFFSEMDSGAPPFSTQPLFYNISGLRWRLTLQSCGSWIPGSVWEFVPVGFGFVRQKADREIRACRNSEPLNGLLSPARRSPFCLPVPASGGPPSIQTSGLRFSKQQGRIRSKGYLLFSFPVNSLCEPSLAKLTYMTRRSPGGPRMYAGKWESNVPCCR

SEQ ID NO: 576 - protein, 695 aa, Mus musculus
MAATGTAAAAATGKLLVLLLLGLTAPAAALAGYIEALAANAGTGFAVAEPQIAMFCGKLNMHVNIQTGKWEPDPTGTKSCLGTKEEVLQYCQEIYPELQITNVMEANQPVNIDSWCRRDKRQCKSHIVIPFKCLVGEFVSDVLLVPDNCQFFHQERMEVCEKHQRWHTLVKEACLTEGLTLYSYGMLLPCGVDQFHGTEYVCCPQTKTVDSDSTMSKEEEEEEEDEEDEEEDYDLDKSEFPTEADLEDFTEAAADEEEEDEEEGEEVVEDRDYYYDPFKGDDYNEENPTEPSSEGTISDKEIVHDVKVPPTPLPTNDVDVYFETSADDNEHARFQKAKEQLEIRHRNRMDRVKKEWEEAELQAKNLPKTERQTLIQHFQAMVKALEKEAASEKQQLVETHLARVEAMLNDRRRIALENYLAALQSDPPRPHRILQALRRYVRAENKDRLHTIRHYQHVLAVDPEKAAQMKSQVMTHLHVIEERRNQSLSLLYKVPYVAQEIQEEIDELLQEQRADMDQFTSSISENPVDVRVSSEESEEIPPFHPLHPFPSLSENEGSGMAEQDGGLIGAEEKVINSKNKMDENMVIDETLDVKEMIFNAERVGGLEEEPESVGPLREDFSLSSNALIGLLVIAVAIATVIVISLVMLRKRQYGTISHGIVEVDPMLTPEERHLNKMQNHGYENPTYKYLEQMQI

SEQ ID NO: 577 - protein, 1663 aa, Mus musculus
MGPASGSQLLVLLLLLASSPLALGIPMYSIITPNVLRLESEETIVLEAHDAQGDIPVTVTVQDFLKRQVLTSEKTVLTGASGHLRSVSIKIPASKEFNSDKEGHKYVTVVANFGETVVEKAVMVSFQSGYLFIQTDKTIYTPGSTVLYRIFTVDNNLLPVGKTVVILIETPDGIPVKRDILSSNNQHGILPLSWNIPELVNMGQWKIRAFYEHAPKQIFSAEFEVKEYVLPSFEVRVEPTETFYYIDDPNGLEVSIIAKFLYGKNVDGTAFVIFGVQDGDKKISLAHSLTRVVIEDGVGDAVLTRKVLMEGVRPSNADALVGKSLYVSVTVILHSGSDMVEAERSGIPIVTSPYQIHFTKTPKFFKPAMPFDLMVFVTNPDGSPASKVLVVTQGSNAKALTQDDGVAKLSINTPNSRQPLTITVRTKKDTLPESRQATKTMEAHPYSTMHNSNNYLHLSVSRMELKPGDNLNVNFHLRTDPGHEAKIRYYTYLVMNKGKLLKAGRQVREPGQDLVVLSLPITPEFIPSFRLVAYYTLIGASGQREVVADSVWVDVKDSCIGTLVVKGDPRDNHLAPGQQTTLRIEGNQGARVGLVAVDKGVFVLNKKNKLTQSKIWDVVEKADIGCTPGSGKNYAGVFMDAGLAFKTSQGLQTEQRADLECTKPAARRRRSVQLMERRMDKAGQYTDKGLRKCCEDGMRDIPMRYSCQRRARLITQGENCIKAFIDCCNHITKLREQHRRDHVLGLARSELEEDIIPEEDIISRSHFPQSWLWTIEELKEPEKNGISTKVMNIFLKDSITTWEILAVSLSDKKGICVADPYEIRVMQDFFIDLRLPYSVVRNEQVEIRAVLFNYREQQELKVRVELLHNPAFCSMATAKNRYFQTIKIPPKSSVAVPYVIVPLKIGQQEVEVKAAVFNHFISDGVKKTLKVVPEGMRINKTVAIHTLDPEKLGQGGVQKVDVPAADLSDQVPDTDSETRIILQGSPVVQMAEDAVDGERLKHLIVTPAGCGEQNMIGMTPTVIAVHYLDQTEQWEKFGIEKRQEALELIKKGYTQQLAFKQPSSAYAAFNNRPPSTWLTAYVVKVFSLAANLIAIDSHVLCGAVKWLILEKQKPDGVFQEDGPVIHQEMIGGFRNAKEADVSLTAFVLIALQEARDICEGQVNSLPGSINKAGEYIEASYMNLQRPYTVAIAGYALALMNKLEEPYLGKFLNTAKDRNRWEEPDQQLYNVEATSYALLALLLLKDFDSVPPVVRWLNEQRYYGGGYGSTQATFMVFQALAQYQTDVPDHKDLNMDVSFHLPSRSSATTFRLLWENGNLLRSEETKQNEAFSLTAKGKGRGTLSVVAVYHAKLKSKVTCKKFDLRVSIRPAPETAKKPEEAKNTMFLEICTKYLGDVDATMSILDISMMTGFAPDTKDLELLASGVDRYISKYEMNKAFSNKNTLIIYLEKISHTEEDCLTFKVHQYFNVGLIQPGSVKVYSYYNLEESCTRFYHPEKDDGMLSKLCHSEMCRCAEENCFMQQSQEKINLNVRLDKACEPGVDYVYKTELTNIKLLDDFDEYTMTIQQVIKSGSDEVQAGQQRKFISHIKCRNALKLQKGKKYLMWGLSSDLWGEKPNTSYIIGKDTWVEHWPEAEECQDQKYQKQCEELGAFTESMVVYGCPN

SEQ ID NO: 578 - protein, 773 aa, Mus musculus
MAEAHQAVAFQFTVTPDGIDLRLSHEALKQICLSGLHSWKKKFIRFKNGIITGVFPASPSSWLIVVVGVISSMHTKVDPSLGMIAKINRTLDTTGRMSSQTKNIVSGVLFGTGLWVAIIMTMRYSLKVLLSYHGWMFAEHGKMSRSTRIWMAMVKVFSGRKPMLYSFQTSLPRLPVPAVKDTVSRYLESVRPLMKEGDFQRMTALAQDFAVNLGPKLQWYLKLKSWWATNYVSDWWEEYIYLRGRGPIMVNSNYYAMEMLYITPTHIQAARAGNTIHAILLYRRTVDREELKPIRLLGSTIPLCSAQWERLFNTSRIPGEETDTIQHVKDSRHIVVYHRGRYFKVWLYHDGRLLRPRELEQQMQQILDDTSEPQPGEAKLAALTAADRVPWAKCRQTYFARGKNKQSLDAVEKAAFFVTLDESEQGYREEDPEASIDSYAKSLLHGRCFDRWFDKSITFVVFKNSKIGINAEHSWADAPIVGHLWEYVMATDVFQLGYSEDGHCKGDKNPNIPKPTRLQWDIPGECQEVIDTSLSSASFLANDVDLHSFPFDTFGKGLIKKCRTSPDAFIQLALQLAHYKDMGKFCLTYEASMTRLFREGRTETVRSCTTESCNFVLAMMDPTTTAEQRFKLFKIACEKHQHLYRLAMTGAGIDRHLFCLYVVSKYLAVDSPFLKEVLSEPWRLSTSQTPQQQVELFDFEKYPDYVSCGGGFGPVADDGYGVSYIIVGENFIHFHISSKFSSPETDSHRFGKHLRQAMMDIITLFGLTANSKK

SEQ ID NO: 579 - protein, 194 aa, Mus musculus
MPEPAKSAPAPKKGSKKAVTKAQKKDGKKRKRQPQGELLGVRVQGAEASAPRHRHLLQGHGHHELVRERHLRAHRGRGVPPGALQQALDHHVPGDPDGRAPAAARGAGQARGVGGHQGRHQVHQLQVILPRGADLTSFVPLNSAGCCNLKTVRMGDTSRLTTIVSELKEQLRSTILNSIKMFTVEICDKKDTQM

SEQ ID NO: 580 - protein, 562 aa, Mus musculus
MGLQARLLGLLALVIAGKCTYNPEPDQRWMLPPGWVSLGRVDPEEELSLTFALKQRNLERLSELVQAVSDPSSPQYGKYLTLEDVAELVQPSPLTLLTVQKWLSAAGARNCDSVTTQDFLTCWLSVRQAELLLPGAEFHRYVGGPTKTHVIRSPHPYQLPQALAPHVDFVGGLHRFPPSSPRQRPEPQQVGTVSLHLGVTPSVLRQRYNLTAKDVGSGTTNNSQACAQFLEQYFHNSDLTEFMRLFGGSFTHQASVAKVVGKQGRGRAGIEASLDVEYLMSAGANISTWVYSSPGRHEAQEPFLQWLLLLSNESSLPHVHTVSYGDDEDSLSSIYIQRVNTEFMKAAARGLTLLFASGDTGAGCWSVSGRHKFRPSFPASSPYVTTVGGTSFKNPFLITDEVVDYISGGGFSNVFPRPPYQEEAVAQFLKSSSHLPPSSYFNASGRAYPDVAALSDGYWVVSNMVPIPWVSGTSASTPVFGGILSLINEHRILNGRPPLGFLNPRLYQQHGTGLFDVTHGCHESCLNEEVEGQGFCSGPGWDPVTGWGTPNFPALLKTLLNP

SEQ ID NO: 581 - protein, 220 aa, Mus musculus
MGAAARSLRLALGLLLLATLLRPADACSCSPVHPQQAFCNADVVIRAKAVSEKEVDSGNDIYGNPIKRIQYEIKQIKMFKGPDKDIEFIYTAPSSAVCGVSLDVGGKKEYLIAGKAEGDGKMHITLCDFIVPWDTLSITQKKSLNHRYQMGCECKITRCPMIPCYISSPDECLWMDWVTEKSINGHQAKFFACIKRSDGSCAWYRGAAPPKQEFLDIEDP

SEQ ID NO: 582 - protein, 320 aa, Mus musculus
MAAAAAAAAATEQQGSNGPVKKSMREKAVERRNVNKEHNSNFKAGYIPIDEDRLHKTGLRGRKGNLAICVIVLLFILAVINLLITLVIWAVIRIGPNGCDSMEFHESGLLRFKQVSDMGVIHPLYKSTVGGRRNENLVITGNNQPIVFQQGTTKLSVEKNKTSITSDIGMQFFDPRTHNILFSTDYETHEFHLPSGVKSLNVQKASTERITSNATSDLNIKVDGRAIVRGNEGVFIMGKTIEFHMGGDVELKAENSIILNGTVMVSPTRLPSSSSGDQSGSGDWVRYKLCMCADGTLFKVQVTGHNMGCQVSDNPCGNTH

SEQ ID NO: 583 - protein, 452 aa, Mus musculus
MLLLLLLLLVAAAQAVALAPRRFTPDWQSLDSRPLPSWFDEAKFGVFVHWGVFSVPAWGSEWFWWHWQGDRMPAYQRFMTENYPPGFSYADFAPQFTARFFHPDQWAELFQAAGAKYVVLTTKHHEGFTNWPSPVSWNWNSKDVGPHRDLVGELGAAVRKRNIRYGLYHSLLEWFHPLYLLDKKNGFKTQHFVRAKTMPELYDLVNSYKPDLIWSDGEWECPDTYWNSTSFLAWLYNDSPVKDEVIVNDRWGQNCSCHHGGYYNCQDKYKPQSLPDHKWEMCTSMDRASWGYRKDMTMSTIAKENEIIEELVQTVSLGGNYLLNIGPTKDGLIVPIFQERLLAVGKWLQINGEAIYASKPWRVQSEKNKTVVWYTTKNTTVYATFLYWPENGIVNLKSPKTTSATKITMLGLEGDLSWTQDPLEGVLISLPQLPPTVLPVEFAWTLKLTKVN

SEQ ID NO: 584 - protein, 338 aa, Mus musculus
MTTTLVSATIFDLSEVLCKGNKMLNYSTPSAGGCLLDRKAVGTPAGGGFPRRHSVTLPSSKFHQNQLLSSLKGEPAPSLSSRDSRFRDRSFSEGGERLLPTQKQPGSGQVNSSRYKTELCRPFEENGACKYGDKCQFAHGIHELRSLTRHPKYKTELCRTFHTIGFCPYGPRCHFIHNAEERRALAGGRDLSADRPRLQHSFSFAGFPSAAATAAATGLLDSPTSITPPPILSADDLLGSPTLPDGTNNPFAFSSQELASLFAPSMGLPGGGSPTTFLFRPMSESPHMFDSPPSPQDSLSDHEGYLSSSSSSHSGSDSPTLDNSRRLPIFSRLSISDD

SEQ ID NO: 585 - protein, 417 aa, Mus musculus
MQALVLLLWTGALLGHGSSQNVPSSSEGSPVPDSTGEPVEEEDPFFKVPVNKLAAAVSNFGYDLYRLRSGASPTGNVLLSPLSVATALSALSLGAEHRTESVIHRALYYDLITNPDIHSTYKELLASVTAPEKNLKRASRIVFERKLRVKSSFVAPLEKSYGTRPRILTGNPRVDLQEINNWVQAQMKGKIARSTREMPSALSILLLGVAYFKGQWVTKFDSRKTTLQDFHLDEDRTVRVPMMSDPKAILRYGLDSDLNCKIAQLPLTGSMSIIFFLPLTVTQNLTMIEESLTSEFIHDIDRELKTIQAVLTVPKLKLSFEGELTKSLQDMKLQSLFESPDFSKITGKPVKLTQVEHRAAFEWNEEGAGSSPSPGLLPVRLTFPLDYHLNQPFLFVLRDTDTGALLFIGRILDPSST

SEQ ID NO: 586 - protein, 299 aa, Mus musculus
MEHFDASLSTYFKAFLGPRDTRVKGWFLLDNYIPTFVCSVIYLLIVWLGPKYMKNRQPFSCRGILQLYNLGLTLLSLYMFYELVTGVWEGKYNFFCQGTRSAGESDMKIIRVLWWYYFSKLIEFMDTFFFILRKNNHQITVLHVYHHATMLNIWWFVMNWVPCGHSYFGATLNSFIHVLMYSYYGLSSIPSMRPYLWWKKYITQGQLVQFVLTIIQTTCGVFWPCSFPLGWLFFQIGYMISLIALFTNFYIQTYNKKGASRRKDHLKGHQNGSVAAVNGHTNSFPSLENSVKPRKQRKD

SEQ ID NO: 587 - protein, 61 aa, Mus musculus
MDPNCSCSTGGSCTCTSSCACKNCKCTSCKKSCCSCCPVGCSKCAQGCVCKGAADKCTCCA

SEQ ID NO: 588 - protein, 3678 aa, Mus musculus
MLWWEEVEDCYEREDVQKKTFTKWINAQFSKFGKQHIDNLFSDLQDGKRLLDLLEGLTGQKLPKEKGSTRVHALNNVNKALRVLQKNNVDLVNIGSTDIVDGNHKLTLGLIWNIILHWQVKNVMKTIMAGLQQTNSEKILLSWVRQSTRNYPQVNVINFTSSWSDGLALNALIHSHRPDLFDWNSVVSQHSATQRLEHAFNIAKCQLGIEKLLDPEDVATTYPDKKSILMYITSLFQVLPQQVSIEAIQEVEMLPRTSSKVTREEHFQLHHQMHYSQQITVSLAQGYEQTSSSPKPRFKSYAFTQAAYVATSDSTQSPYPSQHLEAPRDKSLDSSLMETEVNLDSYQTALEEVLSWLLSAEDTLRAQGEISNDVEEVKEQFHAHEGFMMDLTSHQGLVGNVLQLGSQLVGKGKLSEDEEAEVQEQMNLLNSRWECLRVASMEKQSKLHKVLMDLQNQKLKELDDWLTKTEERTKKMEEEPFGPDLEDLKCQVQQHKVLQEDLEQEQVRVNSLTHMVVVVDESSGDHATAALEEQLKVLGDRWANICRWTEDRWIVLQDILLKWQHFTEEQCLFSTWLSEKEDAMKNIQTSGFKDQNEMMSSLHKISTLKIDLEKKKPTMEKLSSLNQDLLSALKNKSVTQKMEIWMENFAQRWDNLTQKLEKSSAQISQAVTTTQPSLTQTTVMETVTMVTTREQIMVKHAQEELPPPPPQKKRQITVDSELRKRLDVDITELHSWITRSEAVLQSSEFAVYRKEGNISDLQEKVNAIAREKAEKFRKLQDASRSAQALVEQMANEGVNAESIRQASEQLNSRWTEFCQLLSERVNWLEYQTNIITFYNQLQQLEQMTTTAENLLKTQSTTLSEPTAIKSQLKICKDEVNRLSALQPQIEQLKIQSLQLKEKGQGPMFLDADFVAFTNHFNHIFDGVRAKEKELQTIFDTLPPMRYQETMSSIRTWIQQSESKLSVPYLSVTEYEIMEERLGKLQALQSSLKEQQNGFNYLSDTVKEMAKKAPSEICQKYLSEFEEIEGHWKKLSSQLVESCQKLEEHMNKLRKFQNHIKTLQKWMAEVDVFLKEEWPALGDAEILKKQLKQCRLLVGDIQTIQPSLNSVNEGGQKIKSEAELEFASRLETELRELNTQWDHICRQVYTRKEALKAGLDKTVSLQKDLSEMHEWMTQAEEEYLERDFEYKTPDELQTAVEEMKRAKEEALQKETKVKLLTETVNSVIAHAPPSAQEALKKELETLTTNYQWLCTRLNGKCKTLEEVWACWHELLSYLEKANKWLNEVELKLKTMENVPAGPEEITEVLESLENLMHHSEENPNQIRLLAQTLTDGGVMDELINEELETFNSRWRELHEEAVRKQKLLEQSIQSAQEIEKSLHLIQESLEFIDKQLAAYITDKVDAAQMPQEAQKIQSDLTSHEISLEEMKKHNQGKDANQRVLSQIDVAQKKLQDVSMKFRLFQKPANFEQRLEESKMILDEVKMHLPALETKSVEQEVIQSQLSHCVNLYKSLSEVKSEVEMVIKTGRQIVQKKQTENPKELDERVTALKLHYNELGAKVTERKQQLEKCLKLSRKMRKEMNVLTEWLAATDTELTKRSAVEGMPSNLDSEVAWGKATQKEIEKQKAHLKSVTELGESLKMVLGKKETLVEDKLSLLNSNWIAVTSRVEEWLNLLLEYQKHMETFDQNIEQITKWIIHADELLDESEKKKPQQKEDILKRLKAEMNDMRPKVDSTRDQAAKLMANRGDHCRKVVEPQISELNRRFAAISHRIKTGKASIPLKELEQFNSDIQKLLEPLEAEIQQGVNLKEEDFNKDMSEDNEGTVNELLQRGDNLQQRITDERKREEIKIKQQLLQTKHNALKDLRSQRRKKALEISHQWYQYKRQADDLLKCLDEIEKKLASLPEPRDERKLKEIDRELQKKKEELNAVRRQAEGLSENGAAMAVEPTQIQLSKRWRQIESNFAQFRRLNFAQIHTLHEETMVVTTEDMPLDVSYVPSTYLTEISHILQALSEVDHLLNTPELCAKDFEDLFKQEESLKNIKDNLQQISGRIDIIHKKKTAALQSATSMEKVKVQEAVAQMDFQGEKLHRMYKERQGRFDRSVEKWRHFHYDMKVFNQWLNEVEQFFKKTQNPENWEHAKYKWYLKELQDGIGQRQAVVRTLNATGEEIIQQSSKTDVNILQEKLGSLSLRWHDICKELAERRKRIEEQKNVLSEFQRDLNEFVLWLEEADNIAITPLGDEQQLKEQLEQVKLLAEELPLRQGILKQLNETGGAVLVSAPIRPEEQDKLEKKLKQTNLQWIKVSRALPEKQGELEVHLKDFRQLEEQLDHLLLWLSPIRNQLEIYNQPSQAGPFDIKEIEVTVHGKQADVERLLSKGQHLYKEKPSTQPVKRKLEDLRSEWEAVNHLLRELRTKQPDRAPGLSTTGASASQTVTLVTQSVVTKETVISKLEMPSSLLLEVPALADFNRAWTELTDWLSLLDRVIKSQRVMVGDLEDINEMIIKQKATLQDLEQRRPQLEELITAAQNLKNKTSNQEARTIITDRIERIQIQWDEVQEQLQNRRQQLNEMLKDSTQWLEAKEEAEQVIGQVRGKLDSWKEGPHTVDAIQKKITETKQLAKDLRQRQISVDVANDLALKLLRDYSADDTRKVHMITENINTSWGNIHKRVSEQEAALEETHRLLQQFPLDLEKFLSWITEAETTANVLQDASRKEKLLEDSRGVRELMKPWQDLQGEIETHTDIYHNLDENGQKILRSLEGSDEAPLLQRRLDNMNFKWSELQKKSLNIRSHLEASSDQWKRLHLSLQELLVWLQLKDDELSRQAPIGGDFPAVQKQNDIHRAFKRELKTKEPVIMSTLETVRIFLTEQPLEGLEKLYQEPRELPPEERAQNVTRLLRKQAEEVNAEWDKLNLRSADWQRKIDEALERLQELQEAADELDLKLRQAEVIKGSWQPVGDLLIDSLQDHLEKVKALRGEIAPLKENVNRVNDLAHQLTTLGIQLSPYNLSTLEDLNTRWRLLQVAVEDRVRQLHEAHRDFGPASQHFLSTSVQGPWERAISPNKVPYYINHETQTTCWDHPKMTELYQSLADLNNVRFSAYRTAMKLRRLQKALCLDLLSLSAACDALDQHNLKQNDQPMDILQIINCLTTIYDRLEQEHNNLVNVPLCVDMCLNWLLNVYDTGRTGRIRVLSFKTGIISLCKAHLEDKYRYLFKQVASSTGFCDQRRLGLLLHDSIQIPRQLGEVASFGGSNIEPSVRSCFQFANNKPEIEAALFLDWMRLEPQSMVWLPVLHRVAAAETAKHQAKCNICKECPIIGFRYRSLKHFNYDICQSCFFSGRVAKGHKMHYPMVEYCTPTTSGEDVRDFAKVLKNKFRTKRYFAKHPRMGYLPVQTVLEGDNMETPVTLINFWPVDSAPASSPQLSHDDTHSRIEHYASRLAEMENSNGSYLNDSISPNESIDDEHLLIQHYCQSLNQDSPLSQPRSPAQILISLESEERGELERILADLEEENRNLQAEYDRLKQQHEHKGLSPLPSPPEMMPTSPQSPRDAELIAEAKLLRQHKGRLEARMQILEDHNKQLESQLHRLRQLLEQPQAEAKVNGTTVSSPSTSLQRSDSSQPMLLRVVGSQTSESMGEEDLLSPPQDTSTGLEEVMEQLNNSFPSSRGRNAPGKPMREDTM

SEQ ID NO: 589 - protein, 1403 aa, Mus musculus
MFRDPTAGWLTPPSPLSLLVMLLLLSRVGALRPDELFPYGESWGDQLLPEGDDESSAAVKLAIPLRFYDAQFSSLYVGTNGIISTQDFPRETQYVDDDFPTDFPAIAPFLADIDTSHSRGRILYREDTSGAVLSLAARYVRTGFPLSGSSFTPTHAFLATWEHVGAYEEVSRGAAPSGELNTFQAVLASDESDTYAFFLYPANGLQFFGTRPKESYNVQLQLPARVGFCRGEADDLKREALYFSLTNTEQFVKNLYQLSNLGIPGVWAFHIGSRFALDNVRPATVGGDPSTARSSALEHPFSHAAALESYTEDSFHYYDENEEDVEYPPVEPGEAPEGHSRIDVSFNSKADPGLVDVGTSSPGSDRVSPWPYPAHGNWPSYRETEWASLDPQTKQGRPVGEGEVLDFRDPAELLDQMGTRAPAPPEADAALLTPVNEDLGGRNTQSYPEAGPVPSEPDVPVPPLEGEVLPHYPESGHVPPLRGGKYVIGLEDHVGFNDQVFTYNGANLETCEHSHGRCSQHAFCTDYTTGFCCHCQSRFYGNGKHCLPEGAPHRVNGKVSGRLRVGHIPVHFTDVDLHAYIVGNDGRAYTAISHVPQPAAQALLPVLPIGGLFGWLFALEKPGSENGFSLTGATFVHDVEVTFHPGEERVCITQTAEGLDPENYLSIKTNIEGQVPFIPANFTAHITPYKEFYHYRDSVVTSSSSRSFSLTSGSINQTWSYHIDQNITYQACRHAPRHLAIPATQQLTVDRAFALYSEDEGVLRFAVTNQIGPVEVDSAPVGVNPCYDGSHTCDTTARCHPGTGVDYTCECTPGFQGDGRSCVDVNECATGFHRCGPNSVCVNLVGSYRCECRSGYEFADDQHTCILIAPPPNPCFDGSHTCAPEGQARCIHHGGSSFSCACLPGFIGTGHQCSDVDECAENRCHEAAICYNTPGSFSCRCQPGYRGDGFHCTSDTVPEDSISGLKPCEYQQRYAQTQHAYPGSRIHIPQCDDQGNFVPLQCHGSTGFCWCVDRNGHEVPGTQTPPGSTPPHCGPPPEPTQRPRTVCERWRESLLEHYGGTPRDDQYVPQCDDLGHFIPLQCHGKSDFCWCVDKDGRELQGTRSQPGTRPACIPTVAPPVVRPTPRPDVTPPSVGTFLLYAQGQQIGHLPFNGSRLQKDAARTLLSLHGSIVVGIDYDCRERMVYWTDVAGRTISRASLEAGAEPETIITSGLISPEGLAIDHFRRTMYWTDSGLDKIERAELDGSERKVLFHTDLVNPRAITVDPIRGNLYWTDWNREAPKIETSSLDGENRRILINKDIGLPNGLTFDPFSKLLCWADAGTKKLECTLPDGTGRRVIQNHLNYPFSIVSYADHFYHTDWRRDGVISVNKDSGQFTDEFLPEQRSHLYGITAVYPYCPTGRK

SEQ ID NO: 590 - protein, 858 aa, Mus musculus
MALVFSALLLLGLCGKISSEGQPAFHNTPGAMNYELPTTKYETQDTFNAGIVGPLYKMVHIFLNVVQPNDFPLDLIKKLIQNKNFDISVDSKEIALYEIGVLICAILGLLFIILMPLVGCFFCMCRCCNKCGGEMHQRQKQNAPCRRKCLGLSLLVICLLMSLGIIYGFVANQQTRTRIKGTQKLAKSNFRDFQTLLTETPKQIDYVVEQYTNTKNKAFSDLDGIGSVLGGRIKDQLKPKVTPVLEEIKAMATAIKQTKDALQNMSSSLKSLQDAATQLNTNLSSVRNSIENSLSSSDCTSDPASKICDSIRPSLSSLGSSLNSSQLPSVDRELNTVTEVDKTDLESLVKRGYTTIDEIPNTIQNQTVDVIKDVKNTLDSISSNIKDMSQSIPIEDMLLQVSHYLNNSNRYLNQELPKLEEYDSYWWLGGLIVCFLLTLIVTFFFLGLLCGVFGYDKHATPTRRGCVSNTGGIFLMAGVGFGFLFCWILMILVVLTFVVGANVEKLLCEPYENKKLLQVLDTPYLLKEQWQFYLSGMLFNNPDINMTFEQVYRDCKRGRGIYAAFQLENVVNVSDHFNIDQISENINTELENLNVNIDSIELLDNTGRKSLEDFAHSGIDTIDYSTYLKETEKSPTEVNLLTFASTLEAKANQLPEGKLKQAFLLDVQNIRAIHQHLLPPVQQSLNTLRQSVWTLQQTSNKLPEKVKKILASLDSVQHFLTNNVSLIVIGETKKFGKTILGYFEHYLHWVFYAITEKMTSCKPMATAMDSAVNGILCGYVADPLNLFWFGIGKATVLLLPAVIIAIKLAKYYRRMDSEDVYDDVETVPMKNLEIDSNGYHKDHLYGVHNPVMTSPSRY

SEQ ID NO: 591 - protein, 906 aa, Mus musculus
MTAVHAGNINFKWDPKSLEIRTLAVERLLEPLVTQVTTLVNTNSKGPSNKKRGRSKKAHVLAASVEQATENFLEKGDKIAKESQFLKEELVVAVEDVRKQGDLMKSAAGEFADDPCSSVKRGNMVRAARALLSAVTRLLILADMADVYKLLVQLKVVEDGILKLRNAGNEQDLGIQYKALKPEVDKLNIMAAKRQQELKDVGNRDQMAAARGILQKNVPILYTASQACLQHPDVAAYKANRDLIYKQLQQAVTGISNAAQATASDDAAQHQGGSGGELAYALNNFDKQIIVDPLSFSEERFRPSLEERLESIISGAALMADSSCTRDDRRERIVAECNAVRQALQDLLSEYMGNAGRKERSDALNSAIDKMTKKTRDLRRQLRKAVMDHVSDSFLETNVPLLVLIEAAKNGNEKEVKEYAQVFREHANKLIEVANLACSISNNEEGVKLVRMSASQLEALCPQVINAALALAAKPQSKLAQENMDLFKEQWEKQVRVLTDAVDDITSIDDFLAVSENHILEDVNKCVIALQEKDVDGLDRTAGAIRGRAARVIHVVTSEMDNYEPGVYTEKVLEATKLLSNTVMPRFTEQVEAAVEALSSDPAQPMDENEFIDASRLVYDGIRDIRKAVLMIRTPEELDDSDFETEDFDVRSRTSVQTEDDQLIAGQSARAIMAQLPQEQKAKIAEQVASFQEEKSKLDAEVSKWDDSGNDIIVLAKQMCMIMMEMTDFTRGKGPLKNTSDVISAAKKIAEAGSRMDKLGRTIADHCPDSACKQDLLAYLQRIALYCHQLNICSKVKAEVQNLGGELVVSGVDSAMSLIQAAKNLMNAVVQTVKASYVASTKYQKSQGMASLNLPAVSWKMKAPEKKPLVKREKQDETQTKIKRASQKKHVNPVQALSEFKAMDSI

SEQ ID NO: 592 - protein, 218 aa, Mus musculus
MPMILGYWNVRGLTHPIRMLLEYTDSSYDEKRYTMGDAPDFDRSQWLNEKFKLGLDFPNLPYLIDGSHKITQSNAILRYLARKHHLDGETEEERIRADIVENQVMDTRMQLIMLCYNPDFEKQKPEFLKTIPEKMKLYSEFLGKRPWFAGDKVTYVDFLAYDILDQYRMFEPKCLDAFPNLRDFLARFEGLKKISAYMKSSRYIATPIFSKMAHWSNK

SEQ ID NO: 593 - protein, 321 aa, Mus musculus
MRLGPRPAALGLLLPLLLYAAVAGASKAEELHYPQGEHRADYDREALLGVQEDVDEYVKLGHEEQQRRLQSIIKKIDSDSDGFLTENELSQWIQMSFKHYAMQEAKQQFVEYDKNSDGDPVTWDEYNIQMYDRVIDFDENTALDDTEEGSFRQLHLKDKKRFEKANQDSGPGLSLEEFIAFEHPEEVDYMTEFVIQEALEEHDKNGDGFVSLEEFLGDYRRDPTANEDPEWILVEKDRFVNDYDKDNDGRLDPQELLSWVVPNNQGIAQEEALHLIDEMDLNSDKKLSEEEILENQDLFLTSDQTDYGRQLHDDYFYHDEL

SEQ ID NO: 594 - protein, 327 aa, Mus musculus
MATAMTVSSKLRGLLMQQLRGTSQLYFNISLRSLSSSAQEASKRAPEEVSDHNYESIQVTSAQKHVLHVQLNRPEKRNAMNRAFWRELVECFQKISKDSDCRAVVVSGAGKMFTSGIDLMDMASELMQPSGDDAARIAWYLRDLISKYQKTFTVIEKCPKPVIAAIHGGCIGGGVDLVSACDIRYCTQDAFFQIKEVDMGLAADVGTLQRLPKVIGNQSLVNELTFSARKMMADEALDSGLVSRVFQDKDAMLNAAFALAADISSKSPVAVQGSKINLIYSRDHSVDESLDYMATWNMSMLQTQDIIKSVQAAMEKRDTKSITFSKL

SEQ ID NO: 595 - protein, 2055 aa, Mus musculus
  MOD_RES (922)..(922): Variable amino acid
MLETIDKNRALQAAERLQSKLKERGDVANEDKLSLLKSVLQSPLFSQILNLQTSLQQLKDQVNIATLATAAADHAHTPQFSSAVISNLQSESLLLSPNHGNLEALPGPGAPAVMDGKPTCDELDQLIKNMAQGRHVEIFELLKPPCGGLGFSVVGLRSENRGELGIFVQEIQEGSVAHRDGRLKETDQILAINGQVLDQTITHQQAISILQKAKDTVQLVIARGSLPPVSSPRISRSPSAASTISAHSNPMHWQHVETIELVNDGSGLGFGIIGGKATGVIVKTILPGGVADQHGRLCSGDHILKIGDTDLAGMSSEQVAQVLRQCGNRVKLMIARGAVEETPASSSLGITLSSSTSSTSEMRVDASTQKNDESETFDVELTKNVQGLGITIAGYIGDKKLEPSGIFVKSITKSSAVEHDGRIQIGDQIIAVDGTNLQGFTNQQAVEVLRHTGQTVRLTLMRKGASQEAELTSRGDTAKDVDLPAENCEKDEESLSLKRNTSILPIEEEGFPLLSAELEEAEDVQQEAALLTKWQRIMGINYEIVVAHVSKFSENSGLGISLEATVGHHFIRSVLPEGPVGHNGKLFNGDELLEVNGINLLGENHQDVVNILKELPIDVTMVCCRRTVPPIALSEMDSLDINDLELTEKPHIDLGEFIGSSETEDPMLAMSDVDQNAEEIQTPLAMWEAGGQSIELEKGSRGLGFSILDYQDPIDPANTVIVIRSLVPGGIAEKDGRLFPGDRLMFVNDINLENSTLEEAVEALKGAPSGMVRIGVAKPLPLSPEEGYVSAKEDAFLCSPHACKESGLSDKALFRADLALIDTPDAESIAESRFESQFSPDNDSVYSTQASIFSLHDGTCSDGMNYGPSLSSSPPKDVTSSSEVVLGLHLSLEELYTQNLLQRQHAGSSSTDMKPTPTFGFXISDYTTTNAGEQKYQWANPVAWPHSQLPSNLSTFELASALAAVAPKYLTDQTFLASDAESVTLQSMSQEAFERPVTIAKGSSSLGMTVSANKDGLGVIVRSIIHGGAISRDGRIAVGDCILSINEESTISLTNAQARAMLRRHSLIGPDIKITYVPAEHLEEFRVSFGQQAGGIMALDIFSSYTGRDIPELPEREEGEGEESELQNAAYSSWSQPRRVELWREPSKSLGISIVGGRGMGSRLSNGEVMRGIFIKHVLEDSPAGKNGTLKPGDRIIEVDGMDLRDASHEQAVEAIRKAGNPVVFMVQSIINRPRKSPLPSLPHSLYPKYSFSSTNPFADSLQLTTDQAPSQSESETEKPALCNVPPSSPSVFSEMGSDCAQPSATAVSEDEDKEDEFGYSWKNIQERYGSLTGQLHVIELEKGQSGLGLSLAGNKDRTRMSVFIVGIDPTGAAGRDGRLQIADELLEINGQILYGRSHQNASSIIKCAPSKVKIIFIRNADAVNQMAVCPGIAADSPSSTSDSPQNKEVEPCSTTSASAADLSSLTDVYQLELPKDQGGLGIAICEEDTINGVMIESLTEHGGAAKDGRLKPGDHILAVDDEVVAGCPVEKFISLLKTAKATVKLTVRAENPACPAVPSSAVTVSGERKDNSQTPAVPAPDLEPIPSPSRSSTPAVFASDPATCPIIPGCETTIEISKGQTGLGLSIVGGSDTLLGAIIIHEVYEEGAACKDGRLWAGDQILEVNGIDLRKATHDEAINVLRQTPQRVRLTLYRDEAPYKEEDVCDTFTIELQKRPGKGLGLSIVGKRNDTGVFVSDIVKGGIADADGRLMQGDQILMVNGEDVRHATQEAVAALLKCSLGAVTLEVGRVKAAPFHSERRPSQSSQVSESSLSSFTPPLSGINTSESLESNSKKNALASEIQGLRTVEIKKGPADSLGLSIAGGVGSPLGDVPIFIAMMHPNGVAAQTQKLRVGDRIVTICGTSTDGMTHTQAVNLMKNASGSIEVQVVAGGDVSVVTGHQQELANPCLAFTGLTSSSIFPDDLGPSQSKTITLDRGPDGLSFNIVGGYGSPHGDLPIYVKTVFAKGAAAEDGRLKRGDQIIAVNGQSLEGVTHEEAVAILKRTKGTVTLMVLS

SEQ ID NO: 596 - protein, 131 aa, Mus musculus
MAGVKALVALSFSGAIGLTFLMLGCALEDYGVYWPLFVLIFYVISPIPYFIAKRVTYDSDATSSACRELAYFFTTGIVVSAFGLPVVLARVDVIKWGACGLVLAGNAVIFLTIQGFFLVFGRGDDFSWEQW

SEQ ID NO: 597 - protein, 290 aa, Mus musculus
MVIQKEKKSCGQVVEEWKEFVWNPRTHQFMGRTGTSWAFILLFYLVFYGFLTAMFSLTMWVMLQTVSDHTPKYQDRLATPGLMIRPKTENLDVIVNISDTESWGQHVQKLNKFLEPYNDSIQAQKNDVCRPGRYYEQPDNGVLNYPKRACQFNRTQLGDCSGIGDPTHYGYSTGQPCVFIKMNRVINFYAGANQSMNVTCVGKRDEDAENLGHFVMFPANGSIDLMYFPYYGKKFHVNYTQPLVAVKFLNVTPNVEVNVECRINAANIATDDERDKFAGRVAFKLRINKT

SEQ ID NO: 598 - protein, 313 aa, Mus musculus
MVAPMKGQVCVVTGASRGIGRGIALQLCKAGATVYITGRHLDTLRATAQEAQSLGGRCVPVVCDSSQESEVKSLFEQVDREQKGRLDVLVNNAYAGVQAILNTTNKSFWEVPASIWDDINNVGLRGHYLCSVYGARLMVPAGKGLIVIVSSPGGLQHMFNVPYGVGKAACDRLAADCAHELRRHGVSYVSLWPGLVQTEMVKEFMAKEDTPEDPLFKKMKPDFSSAESPEMSGKCVVALATDPNILNLSGKVLPSCDLARRYGLKDIDGRPVKDYFSLGYALSQVSSLGWLNSFLPGFLRVPKWVVTLYNSKF

SEQ ID NO: 599 - protein, 528 aa, Mus musculus
MAGCRLWVSLLLAAALACLATALWPWPQYIQTYHRRYTLYPNNFQFRYHVSSAAQGGCVVLDEAFRRYRNLLFGSGSWPRPSFSNKQQTLGKNILVVSVVTAECNEFPNLESVENYTLTINDDQCLLASETVWGALRGLETFSQLVWKSAEGTFFINKTKIKDFPRFPHRGVLLDTSRHYLPLSSILDTLDVMAYNKFNVFHWHLVDDSSFPYESFTFPELTRKGSFNPVTHIYTAQDVKEVIEYARLRGIRVLAEFDTPGHTLSWGPGAPGLLTPCYSGSHLSGTFGPVNPSLNSTYDFMSTLFLEISSVFPDFYLHLGGDEVDFTCWKSNPNIQAFMKKKGFTDFKQLESFYIQTLLDIVSDYDKGYVVWQEVFDNKVKVRPDTIIQVWREEMPVEYMLEMQDITRAGFRALLSAPWYLNRVKYGPDWKDMYKVEPLAFHGTPEQKALVIGGEACMWGEYVDSTNLVPRLWPRAGAVAERLWSSNLTTNIDFAFKRLSHFRCELVRRGIQAQPISVGYCEQEFEQT

SEQ ID NO: 600 - protein, 172 aa, Mus musculus
MSSKRAKTKTTKKRPQRATSNVFAMFDQSQIQEFKEALNMIDQNRDGFIDKEDLHDMLASMGKNPTDEYLDAMMNEAPGPINFTMFLTMFGEKLNGTDPEDVIRNAFACFDEEAIGTIQEDYLRELLTTMGDRFTDEEVDELYREAPIDKKGNFNYIEFTRILKHGAKDKDD

SEQ ID NO: 601 - protein, 405 aa, Mus musculus
MASQPPPPPKPWESRRIPGAGPGPGSGPGPTYQSADLGPTLLTRPGQPTLTRVPPPILPRPSQQTGSNNVNTFRPAYSSFSSGYGAYGNSFYGSYSPYSYGYNGLGFNRLRVDDLPPSRFVQQAEESSRGAFQSIESIVHAFASVSMMMDATFSAVYNSFRAVLDVANHFSRLKIHFTKVFSAFALVRTIRYLYRRLQWMMGLRRGSENEDLWAESEGTVACLSAEDQATNSAKSWPIFLFFAVILGGPYLIWKLLSTHNDEVTDNTNWASGEDDHVVARAEYDFVAVSDEEISFRAGDMLNLALKEQQPKVRGWLLASLDGQTTGLIPANYVKILGKRRGRKTIESSTMLKQQQSFTNPTLIKGVTTTNPLDEQEAAFESVFVETNKVSSAPDSTGKNGDKQDL

SEQ ID NO: 602 - protein, 382 aa, Mus musculus
MAGIPGLFILLVLLCVFMQVSPYTVPWKPTWPAYRLPVVLPQSTLNLAKADFDAKAKLEVSSSCGPQCHKGTPLPTYEEAKQYLSYETLYANGSRTETRVGIYILSNGEGRARGRDSEATGRSRRKRQIYGYDGRFSIFGKDFLLNYPFSTSVKLSTGCTGTLVAEKHVLTAAHCIHDGKTYVKGTQKLRVGFLKPKYKDGAGGDNSSSSAMPDKMKFQWIRVKRTHVPKGWIKGNANDIGMDYDYALLELKKPHKRQFMKIGVSPPAKQLPGGRIHFSGYDNDRPGNLVYRFCDVKDETYDLLYQQCDAQPGASGSGVYVRMWKRPQQKWERKIIGIFSGHQWVDMNGSPQDFNVAVRITPLKYAQICYWIKGNYLDCREG

SEQ ID NO: 603 - protein, 631 aa, Mus musculus
MAPPGSSAVFLLALTITASVQALTPTHYLTKQDVERLKASLDRPFTDLESAFYSIVGLSSLGVQVPDVKKACTFIKSNLDPSNVDSLFYAAQSSQVLSGCEISVSNETKELLLAAVSEDSPIAQIYHAVAALSGFGLPLASNEALGALTARLGKEETVLATVQALQTASHLSQQADLRNIVEEIEDLVARLDELGGVYLQFEEGLELTALFVAATYKLMDHVGTEPSMKEDQVIQLMNTIFSKKNFESLSEAFSVASAAAALSQNRYHVPVVVVPEGSTSDTQEQAILRLQVSNVLSQPLAQAAVKLEHAKSAATRATVLQKTPFSLVGNVFELNFKNVKLSSGYYDFSVRVEGDSRYIANTVELRVKISTEVGITNVDLSTVDKDQSIAPKTTRVTYPAKAKGTFIADSHQNFALFFQLVDVNTGAELTPHQTFVRLHNQKTGQEVVFVAEPDNKNVYKFELDTSERKIEFDSASGTYTLYLIIGDATLKNPILWNVADVVIKFPEEEAPSTVLSQSLFTPKQEIQHLFREPEKRPPTVVSNTFTALILSPLLLLFALWIRIGANVSNFTFAPSTVIFHLGHAAMLGLMYIYWTQLNMFQTLKYLAVLGTVTFLAGNRMLAQHAVKRTAH

SEQ ID NO: 604 - protein, 632 aa, Mus musculus
METSAAAASAGGFFPSFLLLAFGTLVAAVLGVAHRLGLFYQLMHKVDKTSIRHGGESVAAVLRAHGVRFVFTLVGGHISPLLVACEKLGIRVVDTRHEVTAVFAADAVARLTGTVGVAAVTAGPGLTNTVTAVKNAQVAQSPVLLLGGAASTLLQKRGALQAIDQMSLFRPLCKFCASVRRVRDIVPTLRTAIAAAQSGTPGPVFVELPLDVLYPYFMVEKEMIPTKLPNSLMGRVVVWYLQNCLANLFVGAWEPRPEGPLPLDIPQASPQQVQRCVEILSRAKRPLLVLGSQALLPPTPANKLRAAVETLGVPCFLGGMSRGLLGRNHPLHIRQNRSAALKKADVVVLAGAVCDFRLSYGRVLNRKSSIIIVNRNRDDLLLNSDIFWKPQEAVQGDVGSFMIKLVEGLQGQMWSSDWAEELRKADQQKEQTYRDKALMPVLQHLNPVWVLQQVEETLPDNALLVVDGGDFVATAAYLVQPRGPLRWLDPGAFGTLGVGAGFALGAKLCQPEAEVWCLFGDGAFGYSLIEFDTFVRHKVPVIALVGNDAGWTQISREQVPRLGSDVACSLAYTDYHKAAMGLGAQGLILSRDNKDQVVKVLREGQQLCQDGHAVVVNILIGRTDFRDGSISV

SEQ ID NO: 605 - protein, 384 aa, Mus musculus
MDEDAHARSARNSDKLFQRPRGRHPSLVSAPHRVRRPLLPAMLAALLGGAGARTGTLPGALLCLMALLQLLCSAPRGSGLAHGRRLICWQALLQCQGEPDCSYAYSQYAEACAPVLAQRGGADAPGPAGAFPASAASSPRWRCPSHCISALIQLNHTRRGPALEDCDCAQDEHCRSTKRAIEPCLPRTSSVGPGAGAGSVMGCTEARRRCDRDSRCNLALSRYLAYCGKLFNGLRCTDECRAVIEDMLAVPKAALLNDCVCDGLERPICESVKENMARLCFGPDASNGPGSSGSDGGLDDYYDEEYDDEQRAGAAGGEQPLDDDDGLARPGGGAAAAGGRGDLPHGPGRRSSSSGSGGHWANRSAWTPFACLLLLLLLLLGSHL

SEQ ID NO: 606 - protein, 358 aa, Mus musculus
MRASQQDFENALNQVKLLKKDPGNEVKLRLYALYKQATEGTCNMPKPGMLDFVNKAKWDAWNALGSLPKETARQNYVDLVSSLSSSSEAPSQGKRGADEKARESKDILVTSEDGITKITFNRPTKKNAISFQMYRDIILALKNASTDNTVMAVFTGTGDYYCSGNDLTNFTSATGGIEEAASNGAVLLRDFVNSFIDFPKPLVAVVNGPAVGISVTLLGLFDAVFASDRATFHTPFSQLGQSPEACSSYTFPKMMGSAKAAEMLLFGKKLTAREAWAQGLVTEVFPESTFETEVWTRLKTYANVPPNAMRISKELIRQNEKEKLYAVNAEECTTLQARWLSEECMNAIMSFVSRKPKL

SEQ ID NO: 607 - protein, 404 aa, Mus musculus
MFRCWGPHWGWVPCAPTPWLLLSLLVCSAPFGLQGEETRQVSMEVISGWPNPQNLLHIRAVGSNSTLHYVWSSLGPPAVVLVATNTTQSVLSVNWSLLLSPDPAGALMVLPKSSIQFSSALVFTRLLEFDSTNASEGAQPPGKPYPPYSLAKFSWNNITNSLDLANLSADFQGRPVDDPTGAFANGSLTFKVQAFSRSGRPAQPPRLLHTADVCQLEVALVGASPRGNHSLFGLEVATLGQGPDCPSVNERNSIDDEYAPAVFQLNQLLWGSSPSGFMQWRPVAFSEEERARESALPCQASTLHSTLASSLPHSPIVQAFFGSQNNFCAFNLTFGAPTGPGYWDQYYLCWSMLLGMGFPPVDIFSPLVLGIMAVALGAPGLMFLGGGLFLLLRHRRYSEYQSIN

SEQ ID NO: 608 - protein, 445 aa, Mus musculus
  MOD_RES (246)..(246): Variable amino acid
  MOD_RES (302)..(302): Variable amino acid
MALLGNFLCCLLVAWLCGPGLGVPLAPADRAPAVGQFWHVTDLHLDPTYHITDDRTKVCASSKGANASNPGPFGDVLCDSPYQLILSAFDFIKNSGQEASFMIWTGDSPPHVPVPELSTGTVIKVITNMTMTVQNLFPNLQVFPALGNHDYWPQDQLPIVTSKVYSAVADLWKPWLGEEAISTLKKGGFYSQKVASNPGLRIISLNTNLYYGPNIMTLNKTDPANQFEWLENTLNSSLWNKEKVYXIAHVPVGYLPYATDTPAIRQYYNEKLLDIFRRYSSVIAGQFYGHTHRDSLMVLSDXNGNPLNSVFVAPAVTPVKGVLQKETNNPGVRLFQYKPGDYTLLDMVQYYLNLTEANLKGESNWTLEYVLTQAYSVADLQPKSLYALVQQFATKDSKQFLKYYHYYFVSYDSSATCDQHCKTLQVCAIMNLDSMSYDDCLKQHL

SEQ ID NO: 609 - protein, 789 aa, Mus musculus
MKRGCWTERKLEGRSHLARVERRGGLTLRGAQAGARCVASPRLRASALRAQPLYALLPRLSSLGPATPAPLRTPTAARSASARAASPSLVAVVSDHAVPGCSRVIPGATPCLAFTKMAAPEDRGAEASRPSWKWNTQNGREPRGRQGRLQLEDAQDGCGLLADLLICTELAVALGLLSKPVLHGFYSWFFRHNGELPGLHLAQAHQFVAEGNTQKMHKSINRTETCAFEKWNEEKEDLIIWSELGRESKGEGIEGSKPRHRIKGISETAIPAAATGWSQPLVLGPGVMTRKYISTFSTAEMAAAALSRTLLPEARRRLWGFTRRLPLRRAAAQPLYFGGDRLRSTQAAPQVVLNVPETQVTCLENGLRVASENSGLSTCTVGLWIDAGSRYENEKNNGTAHFLEHMAFKGTKKRSQLDLELEIENMGAHLNAYTSREQTVYYAKAFSRDLPRAVEILADIIQNSTLGEAEIERERGVILREMQEVETNLQEVVFDYLHATAYQNTALGRTILGPTENIKSINRKDLVDYITTHYKGPRIVLAAAGGVCHNELLELAKFHFGDSLCSHKGAIPALPPCKFTGSEIRVRDDKMPLAHLAIAVEAVGWAHPDTICLMVANTLIGNWDRSFGGGMNLSSKLAQLTCHGNLCHSFQSFNTSYTDTGLWGLYMVCEQATVADMLHVVQNEWKRLCTDVTESEVARAKNLLKTNMLLQLDGSTPICEDIGRQMLCYNRRIPIPELEARIDAVDAETVRRVCTKYIHDKSPAIAALGPIERLPDFNQICSNMRWIRD

SEQ ID NO: 610 - protein, 348 aa, Mus musculus
MEEMSLSGLDNSKLEAIAQEIYADLVEDSCLGFCFEVHRAVKCGYFFLDDTDPDSMKDFEIVDQPGLDIFGQVFNQWKSKECVCPNCSRSIAASRFAPHLEKCLGMGRNSSRIANRRIANSNNMNKSESDQEDNDDINDNDWSYGSEKKAKKRKSDKNPNSPRRSKSLKHKNGELSNSDPFKYSNSTGISYETLGPEELRSLLTTQCGVISEHTKKMCTRSLRCPQHTDEQRRTVRIYFLGPSAVLPEVESSLDNDGFDMTDSQALISRLQWDGSSDLSPSDSGSSKTSENQGWGLGMPCTNSSESRKTKKKKSHLSLVGTASGLGSNKKKKPKPPAPPTPSIYDDIN

SEQ ID NO: 611 - protein, 213 aa, Mus musculus
MQPWLWLVFSMKLAALWSSSALIQTPSSLLVQTNHTAKMSCEVKSISKLTSIYWLRERQDPKDKYFEFLASWSSSKGVLYGESVDKKRNIILESSDSRRPFLSIMNVKPEDSDFYFCATVGSPKMVFGTGTKLTVVDVLPTTAPTKKTTLKMKKKKQCPFPHPETQKGLTCSLTTLSLLVVCILLLLAFLGVAVYFYCVRRRARIHFMKQFHK

SEQ ID NO: 612 - protein, 417 aa, Mus musculus
MRSLLLGTLCLLAVALAAEVKKPLEAAAPGTAEKLSSKATTLAERSTGLAFSLYQAMAKDQAVENILLSPLVVASSLGLVSLGGKATTASQAKAVLSAEKLRDEEVHTGLGELLRSLSNSTARNVTWKLGSRLYGPSSVSFADDFVRSSKQHYNCEHSKINFRDKRSALQSINEWASQTTDGKLPEVTKDVERTDGALLVNAMFFKPHWDERFHHRMVDNRGFMVTRSYTVGVTMMHRTGLYNYYDDEKEKLQMVEMPLAHKLSSLIILMPHHVEPLERLEKLLTKEQLKAWMGKMQKKAVAISLPKGVVEVTHDLQKHLAGLGLTEAIDKNKADLSRMSGKKDLYLASVFHATAFEWDTEGNPFDQDIYGREELRSPKLFYADHPFIFLVRDNQSGSLLFIGRLVRPKGDKMRDEL

SEQ ID NO: 613 - protein, 418 aa, Mus musculus
MPPRRWSGASGPSRQLGTMPRFSLSRMTPPLPARVDFSLAGALNAGFKETRASERAEMMELNDRFASYIEKVRFLEQQNKALAAELNQLRAKEPTKLADVYQAELRELRLRLDQLTANSARLEVERDNFAQDLGTLRQKLQDETNLRLEAENNLAAYRQEAHEATLARVDLERKVESLEEEIQFLRKIYEEEVRDLREQLAQQQVHVEMDVAKPDLTAALREIRTQYEAVATSNMQETEEWYRSKFADLTDAASRNAELLRQAKHEANDYRRQLQALTCDLESLRGTNESLERQMREQEERHARESASYQEALARLEEEGQSLKEEMARHLQEYHDLLNVKLALDIEIATYRKLLEGEENRITIPVQTFSNLQIRETSLDTKSVSEGHLKRNIVVKTVEMRDGEVIKDSKQEHKDVVM

SEQ ID NO: 614 - protein, 254 aa, Mus musculus
MLRGCGDSDSSPEPLSKHLKMVPGGRKHSGKSGKPPLVDQPKKAFDFEKDDKDLSGSEEDVADEKAPVIDKHGKKRSAGIIEDVGGEVQNMLEKFGADINKALLAKRKRIEMYTKASFKASNQKIEQIWKTQQEEIQKLNNEYSQQFMNVLQQWELDIQKFEEQGEKLSNLFRQQQKIFQQSRIVQSQRMFAMKQIHEQFIKSLEDVEKNNDNLFTGTQSELKKEMAMLQKKVMMETQQQEMANVRKSLQSMLF

SEQ ID NO: 615 - protein, 492 aa, Mus musculus
MPFTTVIFFVMILDFYMDSVCSVKMDVSKCARYGSFPIFISALLFGNFWTHPITDQLRAMNRAAHQESTEHVLSGGVVVSAVFFILSANIPSSPSKRGQKGTLIGYSPEGTPLYHFMGDAFQHSSQSVPRFIKDSLKQVLEESDSRQIFYFLCLNLLFTFVELFYGALTNSLGLISDGFHMLFDCSALVMGLFAALMSRWKATRIFSYGYGRIEILSGFINGLFLIVIAFFVFMESVARLIDPPELDTNMLTPVSVGGLIVNLIGICAFSHAHSHGHGASQGNCHSDHGHSHHAHGHGHDHGHSHGFSGGGMNANMRGVFLHVLADTLGSIGVIVSTVLIEQFGWFIADPLCSLFIAVLIFLSVIPLIKDACQVLLLRLPPDHEKELHIALEKIQKIEGLISYRDPHFWRHSASIVAGTIHIQVTSEVLEQRIVQQVTGILKDAGVNNLTIQVEKEAYFQHMSGLSTGFHDVLAMTKQMESLKYCKDGTYIM

SEQ ID NO: 616 - protein, 198 aa, Mus musculus
MSFIFDWIYSGFSSVLQFLGLYKKSGKLVFLGLDNAGKTTLLHMLKDDRLGQHVPTLHPTSEELTIAGMTFTTFDLGGHVQARRVWKNYLPAINGIVFLVDCADHERLLESKEELDSLMTDETIANVPILILGNKIDRPEAISEERLREMFGLYGQTTGKGSVSLKELNARPLEVFMCSVLKRQGYGEGFRWMAQYID

SEQ ID NO: 617 - protein, 102 aa, Mus musculus
MLEHLSSLPTQMDYKGQKLAEQMFQGVILFSAIVGFIYGYVAEQFGWTVYIVMAGFAFSCLLTLPPWPIYRRHPLKWLPVQDLGTEDKKSGDRKIKRHAKNN

SEQ ID NO: 618 - protein, 355 aa, Mus musculus
MPAHMLQEISSSYTTTTTITAPPSGNEREKVKTVPLHLEEDIRPEMKEDIHDPTYQDEEGPPPKLEYVWRNIILMVLLHLGGLYGIILVPSCKLYTCLFGIFYYMTSALGITAGAHRLWSHRTYKARLPLRIFLIIANTMAFQNDVYEWARDHRAHHKFSETHADPHNSRRGFFFSHVGWLLVRKHPAVKEKGGKLDMSDLKAEKLVMFQRRYYKPGLLLMCFILPTLVPWYCWGETFVNSLFVSTFLRYTLVLNATWLVNSAAHLYGYRPYDKNIQSRENILVSLGAVGEGFHNYHHTFPFDYSASEYRWHINFTTFFIDCMAALGLAYDRKKVSKATVLARIKRTGDGSHKSS

SEQ ID NO: 619 - protein, 306 aa, Mus musculus
MWKRWLALSLVTIALVHGEEEPRSKSKICANVFCGAGRECAVTEKGEPTCLCIEQCKPHKRPVCGSNGKTYLNHCELHRDACLTGSKIQVDYDGHCKEKKSASPSASPVVCYQANRDELRRRLIQWLEAEIIPDGWFSKGSNYSEILDKYFKSFDNGDSHLDSSEFLKFVEQNETAINITTYADQENNKLLRSLCVDALIELSDENADWKLSFQEFLKCLNPSFNPPEKKCALEDETYADGAETEVDCNRCVCSCGHWVCTAMTCDGKNQKGVQTHTEEEKTGYVQELQKHQGTAEKTKKVNTKEI

SEQ ID NO: 620 - protein, 312 aa, Mus musculus
MECAPPAAGFLYWVGASTIAYLALRASYSLFRAFQVWCVGNEALVGPRLGEWAVVTGGTDGIGKAYAEELAKRGMKIVLISRSQDKLNQVSNNIKEKFNVETRTIAVDFSLDDIYDKIKTGLSGLEIGVLVNNVGMSYEYPEYFLEIPDLDNTIKKLININVLSVCKVTRLVLPGMVERSKGVILNISSASGMLPVPLLTIYSATKAFVDFFSQCLHEEYKSKGIFVQSVMPYLVATKLAKIQKPTLDKPSAETFVKSAIKTVGLQTRTTGYVIHSLMGSINSIMPRWMYFKIIMGFSKSLRNRYLKKRKKN

SEQ ID NO: 621 - protein, 301 aa, Mus musculus
MGAQLSTLSHVVLSPVWFIYSLFMKLFQRSTPAITLENPDIKYPLRLIDKEVISPDTRRFRFALPSPQHILGLPIGQHIYLSTRIDGNLVIRPYTPVSSDDDKGFVDLVVKVYFKDTHPKFPAGGKMSQYLENMKIGDTIEFRGPNGLLVYQGKGKFAIRADKKSNPVVRTVKSVGMIAGGTGITPMLQVIRAVLKDPNDHTVCYLLFANQSEKDILLRPELEELRNEHSARFKLWYTVDKAPDAWDYSQGFVNEEMIRDHLPTPGEEPLILMCGPPPMIQFACLPNLERVGHPKERCFTF

SEQ ID NO: 622 - protein, 81 aa, Mus musculus
MAYHGLTVPLIVMSVFWGFVGLLVPWFIPKGPNRGVIITMLVTCSVCCYLFWLIAILAQLNPLFGPQLKNETIWYLKYHWP

SEQ ID NO: 623 - protein, 445 aa, Mus musculus
MSNRNLRSSTNSEFSEGQHQTPSSDSSGHGEDQPQASPGPNKKSHTPKKNISKGAVLHEKPMTVMVLTATEPFNYKEGKENMFHATVATESQYYRVKVFNMDLKEKFTENKFITISKYFNSSGILEINETATVSEAAPNQMFEVPKNIIRSAKETLKISKIKELDSGTLIYGVFAVEKKKVNDKSITFKIKDNEDNIKVVWDKEQHNINYEKGDKLQLFSFHLRKGNGKPILHSGNHSFIKGEKLLKESFEGDGYHKGPKQVVALKATKLFTYDSIKSKKMFHATVATDTEFFRVMVFEENLEKKFIPGNTIALSDYFGMYGSLAIHEYSSVSEVKSQNKEDSSSSDERPIEHLKICDLHLQTEERLFDGEFKVYRKSSGNNCICYGIWDDTGAMKVVVSGQLTSVNCEIGNTIRLVCFELTSNADEWFLRATRYSYMEVIMPEK

SEQ ID NO: 624 - protein, 1249 aa, Mus musculus
MELSDVHCLSGSEELYTIQPTPPVGDDGSGSRPQRLLWQTAVRHITEQRFIHGHRGGGCGGVSRKASNPAGSGPNHHAPQLSSDSVLPLYSLGPGERAHNTGGTKVFPERSGSGSASGSGGGGDLGFLHLDCAPSNSDFFLNGGYSYRGVIFPTLRNSFKSRDLERLYQRYFLGQRRKSEVVMNVLDVLTKLTLLVLHLSLASAPMDPLKGILLGFFTGIEVVICALVVVRKDNTSHTYLQYSGVVTWVAMTTQILAAGLGYGLLGDGIGYVLFTLFATYSMLPLPLTWAILAGLGTSLLQVTLQVLIPRLAVFSINQVLAQVVLFMCMNTAGIFISYLSDRAQRQAFLETRRCVEARLRLETENQRQERLVLSVLPRFVVLEMINDMTNVEDEHLQHQFHRIYIHRYENVSILFADVKGFTNLSTTLSAQELVRMLNELFARFDRLAHEHHCLRIKILGDCYYCVSGLPEPRRDHAHCCVEMGLSMIKTIRFVRSRTKHDVDMRIGIHSGSVLCGVLGLRKWQFDVWSWDVDIANKLESGGIPGRIHISKATLDCLNGDYNVEEGHGKERNEFLRKHNIETYLIKQPEESLLCLPEDIVKESVSCSDRRNSGATFTEGSWSPELPFDNIVGKQNTLAALTRNSINLLPNHLAQALHVQSGPEEINKRIEHTIDLRSGDKLRREHIKPFSLMFKDSSLEHKYSQMRDEVFKSNLVCAFIVLLFITAIQSLLPSSRLMPMTIQFSILIMLHSALVLITTAEDYKCLPLILRKTCCWINETYLARNVIIFASILINFLGAVLNILWCDFDKSIPLKNLTFNSSAVFTDICSYPEYFVFTGVLAMVTCAVFVRLNSVLKLAVLLIMIAIYALLTETIYAGLFLSYDNLNHSGEDFLGTKEASLLLMAMFLLAVFYHGQQLEYTARLDFLWRVQAKEEINEMKELREHNENMLRNILPSHVARHFLEKDRDNEELYSQSYDAVGVMFASIPGFADFYSQTEMNNQGVECLRLLNEIIADFDELLGEDRFQDIEKIKTIGSTYMAVSGLSPEKQQCEDKWGHLCALADFSLALTESIQEINKHSFNNFELRIGISHGSVVAGVIGAKKPQYDIWGKTVNLASRMDSTGVSGRIQVPEETYLILKDQGFAFDYRGEIYVKGISEQEGKIKTYFLLGRVQPNPFILPPRRLPGQYSLAAVVLGLVQSLNRQRQKQLLNENSNSGIIKSHYNRRTLLTPSGPEPGAQAEGTDKSDLP

SEQ ID NO: 625 - protein, 595 aa, Mus musculus
MEPEPAAQKQPRPRRRSRRVSMLSEEPAAGLPADTPGPAANERCSLRRGSSFTFLTPGPHWDFTLKRKRREKDDDAVSLSSLDLKEPSNKRVRPLARVTSLANLISPVRNGAVRRFGQTIQSFTLRGDHRSPASAQKSFSRSTVPTPTKRRSSALWSEMLDINMKESLTTREIKRQEAIYELSRGEQDLIEDLKLARKAYHDPMLKLSIMSEEELTHIFGDLDAYIPLHEDLLARIGEATKPDGTVEQIGHILVNWLPGLNAYRGYCSNQLAAKALLDQKKQDPRVQDFLQRCLESPFSRKLDLWSFLDIPRSRLVKYPLLLKEILRHTPKDHRDVQLLEEAILIIQGVLSDINLKKGESECQYYINKLEYLDEKQKDPRIEASKVLLCHGELKNKSGHKLYIFLFQDILVWTRPVTGNERHLYQVYRQPIPVQELVLEDLQDGDVRMGGSFRGAFGNSDKAKNIFRVRFQDLSPGHSHTLQANDVFHKQQWFNCIRAAIAPFQRAASPLELQGLPDLHEECEENNPSAGNLRAQRRSCVVSWCHADRRGKRLDCGSSVQTVEDTRNMKAQRPQPGLRRASHKAQSGGKKKETLV

SEQ ID NO: 626 - protein, 394 aa, Mus musculus
MRGQSLLTWVLAAAVTCAQAQDVPPWTEDCRKSTYPPSGPTYRGPVPWHTINLDLPPYKRWHELLAQKAPALRILVNSITSLVNTFVPSGKLMKMVDQKLPGMIGSLPDPFGEEMRGIADVTGIPLGEIISFNIFYELFTMCTSIITEDEKGHLLHGRNMDFGIFLGWNINNNTWVVTEELKPLTVNLDFQRNNKTVFKATSFVGYVGMLTGFKPGLFSLSLNERFSINGGYLGILEWMFGRKDAQWVGFITRSVLENTTSYEEAKNTLTKTKIMAPVYFILGGKKSGEGCVITRERKESLDVYELDPKHGRWYVVQTNYDRWKNTLFIDDRRTPAKKCLNHTTQKNLSFATIYDVLSTKPVLNKLTVFTTLMDVTKGQFESHLRDCPDPCIGW

SEQ ID NO: 627 - protein, 741 aa, Mus musculus
MLERKKPKTAENQKASEENEITQPGGSSAKPALPCLNFEAVLSPAPALIHSTHSLTNSHAHTGSSDCDISCKGMTERIHSINLHNFSNSVLETLNEQRNRGHFCDVTVRIHGSMLRAHRCVLAAGSPFFQDKLLLGYSDIEIPSVVSVQSVQKLIDFMYSGVLRVSQSEALQILTAASILQIKTVIDECTRIVSQNVGDVFPGIQDSGQDTPRGTPESGTSGQSSDTESGYLQSHPQHSVDRIYSALYACSMQNGSGERSFYSGAVVSHHETALGLPRDHHMEDPSWITRIHERSQQMERYLSTTPETTHCRKQPRPVRIQTLVGNIHIKQEMEDDYDYYGQQRVQILERNESEECTEDTDQAEGTESEPKGESFDSGVSSSIGTEPDSVEQQFGAAAPRDGQAEPAQPEQAAEAPAESSDQPNQLEPGASSPERSNESEMDNTVITVSNSSDKGVLQQPSVNTSIGQPLPSTQLYLRQTETLTSNLRMPLTLTSNTQVIGTAGNTYLPALFTTQPAGSGPKPFLFSLPQPLTGQQTQFVTVSQPGLSTFTAQLPAPQPLASSAGHSTASGQGDKKPYECTLCNKTFTAKQNYVKHMFVHTGEKPHQCSICWRSFSLKDYLIKHMVTHTGVRAYQCSICNKRFTQKSSLNVHMRLHRGEKSYECYICKKKFSHKTLLERHVALHSASNGTPPAGTPPGARAGPPGVVACTEGTTYVCSVCPAKFDQIEQFNDHMRMHVSDG

SEQ ID NO: 628 - protein, 174 aa, Mus musculus
MAPANLGLTPHWVMLLGAVLLLLLSGASAQEPPRVGCSEYTNRSCEECLRNVSCLWCNENKACMDYPVRKILPPASLCKLSSARWGVCWVNFEALIITMSVLGGSVLLGITVCCCYCCRRKKSRKPDKSDERAMREQEERRVRQEERRAEMKSRHDEIRKKYGLFKEQNPYEKF

SEQ ID NO: 629 - protein, 528 aa, Mus musculus; identical to SEQ ID NO: 599

SEQ ID NO: 630 - protein, 172 aa, Mus musculus; identical to SEQ ID NO: 600

SEQ ID NO: 631 - protein, 308 aa, Mus musculus
MGEIKVSPDYNWFRSTVPLKKIIVDDDDSKIWSLYDAGPRSIRCPLIFLPPVSGTADVFFQQILALTGWGYRVIALQYPVYWDHLEFCDGFRKLLDHLQLDKVHLFGASLGGFLAQKFAEYTHKSPRVHSLILCNAFSDTSIFNQTWTANSFWLMPAFMLKKIVLGNFSSGPVDPMMADAIDFMVDRLESLGQSELASRLTLNCQNSYVEPHKIRDIPVTIMDVFDQSALSTEAKEEMYKLYPNARRAHLKTGGNFPYLCRSAEVNLYVQIHLLQFHGTKYAAIDPSVVSAEELEVQKGRLGLSQEEP

SEQ ID NO: 632 - protein, 216 aa, Mus musculus
MSFLFSSRSSKTFKPKKNIPEGSHQYELLKHAEATLGSGNLRQAVMLPEGEDLNEWIAVNTVDFFNQINMLYGTITEFCTEASCPVMSAGPRYEYHWADGTNIKKPIKCSAPKYIDYLMTWVQDQLDDETLFPSKIGVPFPKNFMSVAKTILKRLFRVYAHIYHQHFDSVMQLQEEAHLNTSFKHFIFFVQEFNLIDRRELAPLQELIEKLGSKDR

SEQ ID NO: 633 - protein, 397 aa, Mus musculus
MALLRGVFIVAAKRTPFGAYGGLLKDFSATDLTEFAARAALSAGKVPPETIDSVIVGNVMQSSSDAAYLARHVGLRVGVPTETGALTLNRLCGSGFQSIVSGCQEICSKDAEVVLCGGTESMSQSPYCVRNVRFGTKFGLDLKLEDTLWAGLTDQHVKLPMGMTAENLAAKYNISREDCDRYALQSQQRWKAANEAGYFNEEMAPIEVKTKKGKQTMQVDEHARPQTTLEQLQKLPSVFKKDGTVTAGNASGVSDGAGAVIIASEDAVKKHNFTPLARVVGYFVSGCDPTIMGIGPVPAINGALKKAGLSLKDMDLIDVNEAFAPQFLSVQKALDLDPSKTNVSGGAIALGHPLGGSGSRITAHLVHELRRRGGKYAVGSACIGGGQGIALIIQNTA

SEQ ID NO: 634 - protein, 224 aa, Mus musculus
MAASRWLRAVLLFLCASDLLLLPPPNAYAADTPGEATPPPRKKKDIRDYNDADMARLLEQWEKDDDIEEGDLPEHKRPSAPIDFSKLDPGKPESILKMTKKGKTLMMFVTVSGNPTEKETEEITSLWQGSLFNANYDVQRFIVGSDRAIFMLRDGSYAWEIKDFLVSQDRCAEVTLEGQMYPGKGGGSKEKNKTKPEKAKKKEGDRKPRASKEDNRAGSRREDL

SEQ ID NO: 635 - protein, 339 aa, Mus musculus
MWWSLILLSCLLALTSAHDKPSFHPLSDDLINYINKQNTTWQAGRNFYNVDISYLKKLCGTVLGGPKLPGRVAFGEDIDLPETFDAREQWSNCPTIGQIRDQGSCGSCWAFGAVEAISDRTCIHTNGRVNVEVSAEDLLTCCGIQCGDGCNGGYPSGAWSFWTKKGLVSGGVYNSHVGCLPYTIPPCEHHVNGSRPPCTGEGDTPRCNKSCEAGYSPSYKEDKHFGYTSYSVSNSVKEIMAEIYKNGPVEGAFTVFSDFLTYKSGVYKHEAGDMMGGHAIRILGWGVENGVPYWLAANSWNLDWGDNGFFKILRGENHCGIESEIVAGIPRTDQYWGRF

SEQ ID NO: 636 - protein, 384 aa, Mus musculus; identical to SEQ ID NO: 605

SEQ ID NO: 637 - protein, 361 aa, Mus musculus
MAGCCSVLRAFLFEYDTPRIVLIRSRKVGLMNRVVQLLILAYVIGWVFVWEKGYQETDSVVSSVTTKAKGVAVTNTSQLGFRIWDVADYVVPAQEENSLFIMTNMIVTVNQTQGTCPEIPDKTSICDSDANCTLGSSDTHSSGIGTGRCVPFNASVKTCEVAAWCPVENDAGVPTRNILPNITTSYLKSCIYNARTDPFCPIFRLGQIVADAGHSFQEMAVEGGIMGIQIKWDCNLDRAASHCLPRYSFRRLDTRDLEHNVSPGYNFRFAKYYRDLAGNEQRTLTKAYGIRFDIIVFGKAGKFDIIPTMINVGSGLALLGVATVLCDVIVLYCMKKRYYYRDKKYKYVEDYEQGLSGETDQ

SEQ ID NO: 638 - protein, 445 aa, Mus musculus; identical to SEQ ID NO: 608
  MOD_RES (246)..(246): Variable amino acid
  MOD_RES (302)..(302): Variable amino acid

SEQ ID NO: 639 - protein, 94 aa, Mus musculus
MGSELESAMETLINVFHAHSGKEGDKYKLSKKELKDLLQTELSGFLDVQKDADAVDKVMKELDENGDGEVDFKEYVVLVAALTVACNNFFWETS

SEQ ID NO: 640 - protein, 182 aa, Mus musculus
MMQICDTYNQKHSLFNAMNRFIGAVNNMDQTVMVPSLLRDVPLSEPEIDEVSVEVGGSGGCLEERTTPAPSPGSANESFFAPSRDMYSHYVLLKSIRNDIEWGVLHQPSSPPAGSEESTWKPKDILVGLSHLESADAGEEDLEQQFHYHLRGLHTVLSKLTRKANILTNRYKQEIGFSNWGH

SEQ ID NO: 641 - protein, 430 aa, Mus musculus
MAARLLLRSLRVLSARSAPRPLPSARCSHSGAEARLETPSAKKLTDIGIRRIFSSEHDIFRESVRKFFQEEVIPHHTEWEKAGEVSREVWEKAGKQGLLGINIAEKHGGIGGDLLSTAVTWEEQAYSNCTGPGFSLHSDIVMPYIANYGTKEQIEKFIPQMTAGKCIGAIAMTEPGAGSDLQGVRTNAKRSGSDWILNGSKVFITNGWLSDLVIVVAVTNREARSPAHGISLFLVENGMKGFIKGRKLHKMGMKAQDTAELFFEDVRLPANALLGEENKGFYYLMQELPQERLLIAELAISACEFMFEETRNYVKQRKAFGKTVAHIQTVQHKLAELKTHICVTRAFVDSCLQLHETKRLDSGSASMAKYWASELQNSVAYECVQLHGGWGYMWEYPIAKAYVDARVQPIYGGTNEIMKELIARQIVSDS

SEQ ID NO: 642 - protein, 417 aa, Mus musculus; identical to SEQ ID NO: 612

SEQ ID NO: 643 - protein, 68 aa, Mus musculus
MDPETCPCPTGGSCTCSDKCKCKGCKCTNCKKSCCSCCPAGCEKCAKDCVCKGEEGAKAEAEKCSCCQ

SEQ ID NO: 644 - protein, 198 aa, Mus musculus; identical to SEQ ID NO: 616

SEQ ID NO: 645 - protein, 212 aa, Mus musculus [sequence omitted]

SEQ ID NO: 646 - protein, 1025 aa, Mus musculus
MQLCARAWGLRLGRGAGGGHRLARGTGLSWAQRSRDSSGGGGGGGGGDRGAAGASRLLERLLPRHDDFSRRHIGPGDKDRREMLQALGLASIDELIEKTVPASIRLKRPLKMEDPICENEILETLHAIASKNQIWRSYIGMGYYNCSVPQTILRNLLENSGWVTQYTPYQPEVSQGRLESLLNYQTMVSDITGLDMANASLLDEATAAAEAMQLCHRHNKRKKFFVDPRCHPQTIAVVQTRAKYRGVLVELKLPHEMDFSGKDVCGVLFQYPDTEGKVEDFTELVDRAHQTGSLTCCATDLLALCILRPPGEFGVDIALGNSQRFGVPLGYGGPHAAFFAVKENLVRMMPGRMVGVTRDATGKEVYRLALQTREQHIRRDKATSNICTAQALLANMAAMFAIYHGSQGLKHIAKRVHNATLILSEGLKRAGHQLQHDLFFDTLKVQCGCSVKEVLGRAAQRQINFRLFDDGTLGISLDETVTEKDLDDLLWIFGCESSAELVAEGMGEERRGLLGSSFKRTSPFLTHQVFNSYHSETNLVRYMKKLENKDISLVHSMIPLGSCTMKLNSSSELAPITWREFANIHPFVPLDQAQGYQQLFQGLEKDLCEITGYDRVSFQPNSGAQGEYAGLATIRAYLDQKGERHRTVCLIPKSAHGTNPASAHMAGMKIQPVEVDRYGNIDVAHLKAMVDQHKENLAAIMITYPSTNGVFEENIGDVCALIHQHGGQVYLDGANMNAQVGICRPGDFGSDVSHLNLHKTFCIPHGGGGPGMGPIGVKKHLSPFLPSHPVISIKPTEGTWPVGTVSAAPWGSSSILPISWAYIKMMGGKGLKEATEIAILNANYMAKRLEKHYRVLFRGARGYVAHEFILDTRPFKKSANVEAVDVAKRLQDYGFHAPTMSWPVAGTLMIEPTESEDKAELDRFCDAMISIRQEIADIEEGRIDPRVNPLKMSPHSLTCVTSSCWDRPYSREVAAFPLPFVKPENKFWPTIARIDDIYGDQHLVCTCPPMEVYESPFSEQKRASS

SEQ ID NO: 647 - protein, 355 aa, Mus musculus
MAGCCCLSAEEKESQRISAEIERQLRRDKKDARRELKLLLLGTGESGKSTFIKQMRIIHGSGYSDEDRKGFTKLVYQNIFTAMQAMIRAMDTLRIQYMCEQNKENAQIIREVEVDKVTALSRDQVAAIKQLWLDPGIQECYDRRREYQLSDSAKYYLTDIERIAMPSFVPTQQDVLRVRVPTTGIIEYPFDLENIIFRMVDVGGQRSERRKWIHCFESVTSIIFLVALSEYDQVLAECDNENRMEESKALFRTIITYPWFLNSSVILFLNKKDLLEEKIMYSHLISYFPEYTGPKQDVKAARDFILKLYQDQNPDKEKVIYSHFTCATDTENIPFVFAAVKDTILQLNLREFNLV

SEQ ID NO: 648 - protein, 1066 aa, Mus musculus
MPVFHTRTIESILEPVAQQISHLVIMHEEGEVDGKAIPDLTAPVAAVQAAVSNLVRVGKETVQTTEDQILKRDMPPAFIKVENACTKLVQAAQMLQSDPYSVPARDYLIDGSRGILSGTSDLLLTFDEAEVRKIIRVCKGILEYLTVAEVVETMEDLVTYTKNLGPGMTKMAKMIDERQQELTHQEHRVMLVNSMNTVKELLPVLISAMKIFVTTKNSKNQGIEEALKNRNFTVEKMSAEINEIIRVLQLTSWDEDAWASKDTEAMKRALASIDSKLNQAKGWLRDPNASPGDAGEQAIRQILDEAGKVGELCAGKERREILGTCKMLGQMTDQVADLRARGQGASPVAMQKAQQVSQGLDVLTAKVENAARKLEAMTNSKQSIAKKIDAAQNWLADPNGGPEGEEQIRGALAEARKIAELCDDPKERDDILRSLGEIAALTSKLGDLRRQGKGDSPEARALAKQVATALQNLQTKTNRAVANSRPAKAAVHLEGKIEQAQRWIDNPTVDDRGVGQAAIRGLVAEGHRLANVMMGPYRQDLLAKCDRVDQLTAQLADLAARGEGESPQARALASQLQDSLKDLKAQMQEAMTQEVSDVFSDTTTPIKLLAVAATAPPDAPNREEVFDERAANFENHSGRLGATAEKAAAVGTANKSTVEGIQASVKTARELTPQVISAARILLRNPGNQAAYEHFETMKNQWIDNVEKMTGLVDEAIDTKSLLDASEEAIKKDLDKCKVAMANIQPQMLVAGATSIARRANRILLVAKREVENSEDPKFREAVKAASDELSKTISPMVMDAKAVAGNISDPGLQKSFLDSGYRILGAVAKVREAFQPQEPDFPPPPPDLEQLRLTDELAPPKPPLPEGEVPPPRPPPPEEKDEEFPEQKAGEVINQPMMMAARQLHDEARKWSSKGNDIIAAAKRMALLMAEMSRLVRGGSGTKRALIQCAKDIAKASDEVTRLAKEVAKQCTDKRIRTNLLQVCERIPTISTQLKILSTVKATMLGRTNISDEESEQATEMLVHNAQNLMQSVKETVREAEAASIKIRTDAGFTLRWVRKTPWYQ

SEQ ID NO: 649 - protein, 306 aa, Mus musculus; identical to SEQ ID NO: 619

SEQ ID NO: 650 - protein, 1073 aa, Mus musculus
MAVAGQLCLLYLSAGLLARLGTAFNLDTREDNVIRKSGDPGSLFGFSLAMHWQLQPEDKRLLLVGAPRAEALPLQRANRTGGLYSCDITSRGPCTRIEFDNDADPMSESKEDQWMGVTVQSQGPGGKVVTCAHRYEKRQHVNTKQESRDIFGRCYVLSQNLRIEDDMDGGDWSFCDGRLRGHEKFGSCQQGVAATFTKDFHYIVFGAPGTYNWKGIVRVEQKNNTFFDMNIFEDGPYEVGGETDHDESLVPVPANSYLGFSLDSGKGIVSKDDITFVSGAPRANHSGAVVLLKRDMKSAHLLPEYIFDGEGLASSFGYDVAVVDLNADGWQDIVIGAPQYFDRDGEVGGAVYVYINQQGKWSNVKPIRLNGTKDSMFGISVKNIGDINQDGYPDIAVGAPYDDLGKVFIYHGSPTGIITKPTQVLEGTSPYFGYSIAGNMDLDRNSYPDLAVGSLSDSVTIFRSRPVINILKTITVTPNRIDLRQKSMCGSPSGICLKVKACFEYTAKPSGYNPPISILGILEAEKERRKSGLSSRVQFRNQGSEPKYTQELTLNRQKQRACMEETLWLQENIRDKLRPIPITASVEIQEPSSRRRVNSLPEVLPILNSNEAKTVQTDVHFLKEGCGDDNVCNSNLKLEYKFGTREGNQDKFSYLPIQKGIPELVLKDQKDIALEITVTNSPSDPRNPRKDGDDAHEAKLIATFPDTLTYSAYRELRAFPEKQLSCVANQNGSQADCELGNPFKRNSSVTFYLILSTTEVTFDTTDLDINLKLETTSNQDNLAPITAKAKVVIELLLSVSGVAKPSQVYFGGTVVGEQAMKSEDEVGSLIEYEFRVINLGKPLKNLGTATLNIQWPKEISNGKWLLYLMKVESKGLEQIVCEPHNEINYLKLKESHNSRKKRELPEKQIDDSRKFSLFPERKYQTLNCSVNVRCVNIRCPLRGLDSKASLVLRSRLWNSTFLEEYSKLNYLDILLRASIDVTAAAQNIKLPHAGTQVRVTVFPSKTVAQYSGVAWWIILLAVLAGILMLALLVFLLWKCGFFKRNKKDHYDATYHKAEIHTQPSDKERLTSDA

SEQ ID NO: 651 - protein, 311 aa, Mus musculus
MKALWAVLLVTLLTGCLAEGEPEVTDQLEWQSNQPWEQALNRFWDYLRWVQTLSDQVQEELQSSQVTQELTALMEDTMTEVKAYKKELEEQLGPVAEETRARLGKEVQAAQARLGADMEDLRNRLGQYRNEVHTMLGQSTEEIRARLSTHLRKMRKRLMRDADDLQKRLAVYKAGAREGAERGVSAIRERLGPLVEQGRQRTANLGAGAAQPLRDRAQAFGDRIRGRLEEVGNQARDRLEEVREHMEEVRSKMEEQTQQIRLQAEIFQARLKGWFEPIVEDMHRQWANLMEKIQASVATNPIITPVAQENQ

SEQ ID NO: 652 - protein, 445 aa, Mus musculus; identical to SEQ ID NO: 623

SEQ ID NO: 653 - protein, 1249 aa, Mus musculus; identical to SEQ ID NO: 624

SEQ ID NO: 654 - protein, 448 aa, Mus musculus
MKILLLCVALLLIWDNGMVLGEQEVSDNELQELSTQGSRYINKEIQNAVQGVKHIKTLIEKTNAERKSLLNSLEEAKKKKEDALEDTRDSEMKLKAFPEVCNETMMALWEECKPCLKHTCMKFYARVCRSGSGLVGQQLEEFLNQSSPFYFWMNGDRIDSLLESDRQQSQVLDAMQDSFARASGIIDTLFQDRFFARELHDPHYFSPIGFPHKRPHFLYPKSRLVRSLMSPSHYGPPSFHNMFQPFFEMIHQAQQAMDVQLHSPAFQFPDVDFLREGEDDRTVCKEIRRNSTGCLKMKGQCEKCQEILSVDCSTNNPAQANLRQELNDSLQVAETVTEQYKELLQSFQSNMLNTSSLLEQLNDQFNWVSQLANLTQGEDKYYLRVSTVTTHSSDSEVPSRVTEVVVKLFDSDPITVVLPEEVSKDNPKFMDTVAEKALQEYRRKSRAE

SEQ ID NO: 655 - protein, 741 aa, Mus musculus; identical to SEQ ID NO: 627

SEQ ID NO: 656 - protein, 395 aa, Mus musculus
MNPSSVPHPLPPPGQQVIHVTQDLDTDLEALFNSVMNPKPSSWRKKILPESFFKEPDSGSHSRQSSTDSSGGHPGPRLAGGAQHVRSHSSPASLQLGTGAGAAGGPAQQHAHLRQQSYDVTDELPLPPGWEMTFTATGQRYFLNHIEKITTWQDPRKVMNQPLNHVNLHPSITSTSVPQRSMAVSQPNLAMNHQHQQVVATSLSPQNHPTQNQPTGLMSVPNALTTQQQQQQKLRLQRIQMERERIRMRQEELMRQEAALCRQLPMETETMAPVNTPAMSTDMRSVTNSSSDPFLNGGPYHSREQSTDSGLGLGCYSVPTTPEDFLSNMDEMDTGENSGQTPMTVNPQQTRFPDFLDCLPGTNVDLGTLESEDLIPLFNDVESVLNKSEPFLTWL

SEQ ID NO: 657 - protein, 609 aa, Mus musculus
MWITALLLAVLLLVILHRVYVGLYAASSPNPFAEDVKRPPEPLVTDKEARKKVLKQAFSVSRVPEKLDAVVIGSGIGGLASAAVLAKAGKRVLVLEQHTKAGGCCHTFGENGLEFDTGIHYIGRMREGNIGRFILDQITEGQLDWAPMASPFDLMILEGPNGRKEFPMYSGRKEYIQGLKKKFPKEEAVIDKYMELVKVVARGVSHAVLLKFLPLPLTQLLSKFGLLTRFSPFCRASTQSLAEVLQQLGASRELQAVLSYIFPTYGVTPSHTAFSLHALLVDHYIQGAYYPRGGSSEIAFHTIPLIQRAGGAVLTRATVQSVLLDSAGRACGVSVKKGQELVNIYCPVVISNAGMFNTYQHLLPETVRHLPDVKKQLAMVRPGLSMLSIFICLKGTKEDLKLQSTNYYVYFDTDMDKAMERYVSMPKEKAPEHIPLLFIAFPSSKDPTWEERFPDRSTMTALVPMAFEWFEEWQEEPKGKRGVDYETLKNAFVEASMSVIMKLFPQLEGKVESVTGGSPLTNQYYLAAPRGATYGADHDLARLHPHAMASIRAQTPIPNLYLTGQDIFTCGLMGALQGALLCSSAILKRNLYSDLQALGSKVKAQKKKM

SEQ ID NO: 658 - protein, 65 aa, Mus musculus
MEVSQAASGTDGVRERRGSFEAGRRNQDEAPQSGMNGLPKHSYWLDLWLFILFDLALFVFVYLLP

SEQ ID NO: 659 - protein, 135 aa, Mus musculus
MSSIIRKVISTTKAPAAIGPYSQAVQVDRTIYISGQVGLDPSSGQLVPGGVVEEAKQALKNLGEILKAAGCDFNNVVKTTVLLADMNDFGTVNEIYKTYFQGSLPARAAYQVAALPRGSRVEIEAIAVQGPFIKA

SEQ ID NO: 660 - protein, 259 aa, Mus musculus
MAPAEARGALPGWISVLGWGLALCSLCGAGPLWSGSHEWKKLILTQHWPPTVCKEVNSCQDSLDYWTIHGLWPDRAEDCNQSWHFNLDEIKDLLRDMKIYWPDVIHRSSNRSQFWKHEWVKHGTCAAQVDALNSEKKYFGKSLDLYKQIDLNSVLQKFGIKPSINYYQLADFKDALTRIYGVVPKIQCLMPEQGESVQTVGQIELCFTKEDLHLRNCTEPGEQLSSRQEAWLAMEASTHGMMVCEDGPIFYPPPTKTQH

SEQ ID NO: 661 - protein, 241 aa, Mus musculus
MAEEQPQVELFVKAGSDGAKIGNCPFSQRLFMVLWLKGVTFNVTTVDTKRRTETVQKLCPGGQLPFLLYGTEVHTDTNKIEEFLEAMLCPPRYPKLAALNPESNTSGLDIFAKFSAYIKNSNPALNDNLEKGLLKALKVLDNYLTSPLPEEVDETSAEDEGISQRKFLDGNELTLADCNLLPKLHIVQVVCKKYRGFTIPEAFRGVHRYLSNAYAREEFASTCPDDEEIELAYEQVARALK

SEQ ID NO: 662 - protein, 315 aa, Mus musculus
MACSEFSFHMPSLEELAEVLQKGLTDNFADVQVSVVDCPDLTKEPFTFPVRGICGQTRIAEVGGVPYLLPLVNKKKVYDLNEIAKVIKLPGAFILGAGAGPFQTLGFNSEFMPIVQTASEHNQPVNGSYFAHKNPADGACLLEKYSQKYHDFGCALLANLFASEGQPGKVIEVQAKRRTGELNFVSCMRQTLEEHYGDKPVGMGGTFIVQKGKVKAHIMPAEFSSCPLNSDEAVNKWLHFYEMKAPLVCLPVFVSKDPGLDLRLEHTHFFSHHGEGGHYHYDTTPDTVEYLGYFSPAQFLYRIDQPKETHAFGRD

SEQ ID NO: 663 - protein, 195 aa, Mus musculus
MALCARAALLLGVLQVLALLGAAQDPTDAQGSASGNHSVLTSNINITENTNQTMSVVSNQTSEMQSTAKPSVLPKTTTLITVKPATIVKISTPGVLPHVTPTASKSTPNASASPNSTHTSASMTTPAHSSLLTTVTVSATTHPTKGKGSKFDAGSFVGGIVLTLGVLSILYIGCKMYYSRRGIRYRSIDEHDAII

SEQ ID NO: 664 - protein, 452 aa, Mus musculus
MAGYLRAVSSLCRASGSARTWAPAALTVPSWPEQPRRHYAEKRIKVEKPVVEMDGDEMTRIIWQFIKEKLILPHVDVQLKYFDLGLPNRDQTNDQVTIDSALATQKYSVAVKCATITPDEARVEEFKLKKMWKSPNGTIRNILGGTVFREPIICKNIPRLVPGWTKPITIGRHAHGDQYKATDFVVDRAGTFKLVFTPKDGSSAKEWEVYNFPAGGVGMGMYNTDESISGFAHSCFQYSIQKKWPLYLSTKNTILKAYDGRFKDIFQEIFDKHYKTDFDRNKIWYEHRLIDDMVAQVLKSSGGFVWACKNYDGDVQSDILAQGFGSLGLMTSVLVCPDGKTIEAEAAHGTVTRHYREHQKGRPTSTNPIASIFAWTRGLEHRGKLDGNQDLIRFAQTLEKVCVQTVESGAMTKDLAGCIHGLSNVKLNEHFLNTTDFLDTIKSNLDRALGKQ

SEQ ID NO: 665 - protein, 568 aa, Mus musculus
MPGTDLLKLKDFEPYLEILESYSTKAKNYVNGYCTKYEPWQLIAWSVLCTLLIVWVYELIFQPESLWSRFKKKLFKLIRKMPFIGRKIEQQVSKAKKDLVKNMPFLKVDKDYVKTLPAQGMGTAEVLERLKEYSSMDGSWQEGKASGAVYNGEPKLTELLVQAYGEFTWSNPLHPDIFPGLRKLEAEIVRMTCSLFNGGPDSCGCVTSGGTESILMACKAYRDLALEKGIKTPEIVAPESAHAAFDKAAHYFGMKIVRVALKKNMEVDVQAMKRAISRNTAMLVCSTPQFPHGVMDPVPEVAKLAVRYKIPLHVDACLGGFLIVFMEKAGYPLEKPFDFRVKGVTSISADTHKYGYAPKGSSVVMYSNEKYRTYQFFVGADWQGGVYASPSIAGSRPGGIIAACWAALMHFGENGYVEATKQIIKTARFLKSELENIKNIFIFGDPQLSVIALGSNDFDIYRLSNMMSAKGWNFNYLQFPRSIHFCITLVHTRKRVAIQFLKDIRESVTQIMKNPKAKTTGMGAIYGMAQATIDRKLVAEISSVFLDCLYTTDPVTQGNQMNGSPKPR

SEQ ID NO: 666 - protein, 91 aa, Mus musculus
MDIHTHTHKATCIIRSILPKFMNNKARYICPHVTASILRSLITFRFVDILALYEVLLRGFGSTLELTLIPFLNILFIRETKFRKLLLTIRI

SEQ ID NO: 667 - protein, 302 aa, Mus musculus
MCHGKIAPKSSSEFVVTSVGHGVFLQLVILCALLGDGLASVCPLPPEPENGGYICHPRPCKDPLTAGSVIEYLCAEGYMLKGDYKYLTCKNGEWTPAMEVSCHLIEDKETHALGVPALSIVASTASSVALILLLVVLFVLLQPKLKSFHHSRREQGVSGDQVSIMVDGVQVALPSYEEAVYGSSGHCMPPADPRVQIVLSEGSAPSGRNMPREQQLQGQEACSSAGGEDEAPGHSGLCEAWGSQGSETVMVHQATTSSWVAGSGSSRPTHKDTADSENSDIQSLLSLTSEEYTDDIPLLKEA

SEQ ID NO: 668 - protein, 702 aa, Mus musculus
MAAPAAPAAGETGPDARLEAALADVPELARLLEIDPYLKPFAADFQRRYKKFSQVLHDIGENEGGIDKFSRGYESFGIHRCSDGGIYCKEWAPGAEGVFLTGEFSGWNPFSHPYKKLEYGKWELYIPPKQNKSPLIPHGSKLKVVITSKSGEILYRISPWAKYVVRENNNVNYDWIHWAPEDPYKFKHSRPKKPRSLRIYESHVGISSHEGKIASYKHFTSNVLPRIKDLGYNCIQLMAIMEHAYYASFGYQITSFFAASSRYGTPEELKELVDTAHSMGIVVLLDVVHSHASKNSEDGLNMFDGTDSCYFHSGPRGTHDLWDSRLFIYSSWEVLRFLLSNIRWWLEEYCFDGFRFDGVTSMLYHHHGMGQGFSGDYNEYFGLQVDEDALIYLMLANHLAHTLYPDSITIAEDVSGMPALCSPTSQGGGGFDYRLAMAIPDKWIQLLKEFKDEDWNMGNIVYTLTNRRYLEKCVAYAESHDQALVGDKTLAFWLMDAEMYTNMSVLAPFTPVIDRGIQLHKMIRLITHGLGGEGYLNFMGNEFGHPEWLDFPRKGNNESYHYARRQFNLTDDDLLRYKFLNNFDRDMNRLEERCGWLSAPQAYVSEKHEANKTITFERAGLLFIFNFHPSKSYTDYRVGTATPGKFKIVLDSDAAEYGGHQRLDHNTNYFAEAFEHNGRPYSLLVYIPSRVALILQNVDLQN

SEQ ID NO: 669 - protein, 222 aa, Mus musculus
MEIPPTHYAASRAASVAENCINYQQGTPHKLFLVQTVQQASKEDIPGRGHKYHLKFSVEEIIQKQVTVNCTAEVLYPQMGQGSAPEVNFTFEGEIGKNPDEEDNTFYQSLMSLKRPLEAQDIPDNFGNVSPQMKPVQHLAWVACGYVMWQNSTEDTWYKMLKIQTVKQVQRNDDFIELDYTILLHDIASQEIIPWQMQVLWHPQYGTKVKHNSRLPKEGQAE

SEQ ID NO: 670 - protein, 369 aa, Mus musculus
MAPGKLLLLLAAALAPTQTRAGPHSMRYFETAVSRPGLGEPRYISVGYVDNTEFVRFDSDAENPRDEPRVRWMEQEGPEYWERETQKSKSNEQWFRVSLRTALRYYNQSESGSHTFQGMYGCEVGSDWRLLRGYEQVAYDGRDYIALNEDLKTWTAADMAALITKHKWEQAGAAERDRAYLEGECVEWLRRYLELGNATLLRTDSPKAHVTHHPRSEDYVTLRCWALGFYPADITLTWQLNGEELTQDMELVETRPAGDGTFQKWASVVVPRGKEQNYTCHVHHEGLPEPLTLRWEPPPSTDSYMVIIAVLGVLGALAIFGAVVAFVRRRRRRNTGGKGGDYTLAPGSQSSDMSLPDCKVMVDDPHSLA

SEQ ID NO: 671 - protein, 381 aa, Mus musculus
MSETSCSFFIEKEFQDGQLENVSAGLSSSYKDKGALMAFRGIPISELTNHGILQALTAETNGWQPGVVSEEVLRAQEEWEVVDTIHPDIESGVHCQQPGQLISFNEALEHFQSVDLSSFKKRIQPTIQRTGLAALRHCLFGPPKLHQGLREERDLVLTIAQCGLDSQNPTHGRVLQTIYKKLTGSKFDCALHGDHWEDLGFQGANPATDLRGAGFLALLHLLYLVMDSKTFLMAQEIFRLSHHHIQQFPFCLMSVNITRIAIQALREECLSRECNRRQKVIPVVNSFYAATFLHLARVWRTQQKTILDSGFVLKDLEALAKKSPKRLLKTLDDYLAQVSKGQTSLLEAHKRPGSQGPHSRDLTFTGVCDLQSHSFESAGLI

SEQ ID NO: 672 - protein, 194 aa, Mus musculus
MAIRELKVCLLGDTGVGKSSIVCRFVQDHFDHNISPTIGASFMTKTVPCGNELHKFLIWDTAGQERFHSLAPMYYRGSAAAVIVYDITKQDSFHTLKKWVKELKEHGPENIVMAIAGNKCDLSDIREVPLKDAKEYAESIGAIVVETSAKNAINIEELFQGISRQIPPLGPQENGNSGGIKLGNQSLQASRRCC

SEQ ID NO: 673 - protein, 587 aa, Mus musculus
MRPLPGAPGVAAAAALLLLLLPRARSDEHEHTYQDKEEVVLWMNTVGPYHNRQETYKYFSLPFCVGSKKSISHYHETLGEALQGVELEFSGLDIKFKDDVMPGTYCEIDLDKEKRDAFVYAIKNHYWYQMYIDDLPIWGIVGEADENGEDYYLWTYKKLEIGFNGNRIVDVNLTSEGKVKLVPNTKIQMSYSVKWKKSDVKFEDRFDKYLDPSFFQHRIHWFSIFNSFMMVIFLVGLVSMILMRTLRKDYARYSKEEEMDDMDRDLGDEYGWKQVHGDVFRPSSHPLIFSSLIGSGCQIFAVSLIVIIVAMIEDLYTERGSMLSTAIFVYAATSPVNGYFGGSLYARQGGRRWIKQMFIGAFLIPAMVCGTAFFINFIAIYYHASRAIPFGTMVAVCCICFFVILPLNLVGTILGRNLSGQPNFPCRVNAVPRPIPEKKWFMEPAVIVCLGGILPFGSIFIEMYFIFTSFWAYKIYYVYGFMMLVLVILCIVTVCVTIVCTYFLLNAEDYRWQWTSFLSAASTAIYVYMYSFYYYFFKTKMYGLFQTSFYFGYMAVFSTALGIMCGAIGYMGTSAFVRKIYTNVKID

SEQ ID NO: 674 - protein, 385 aa, Mus musculus
MFLGALWLLLLLPLRPPGAQGQEADEPTPWPSVKGLKEQLRTAGALSKRYWELFSCTLWPDHCEDQETPVPPLGWSLPLWGRRSLDVLTAWLCHFQDCCSGGGDCRISNNLTGLESDLCVRLHGQHLASKLVLRAVKGYLEMPQVGKALALSFHGWSGTGKNFVARILMDNLYRDGMRSDCVKMFISTFHFPHPKYVDTYKEELQRQMQETQWRCHQSTFVFDEAEKLHPGLLELLEPYLEPRSPEARGVEAPRAIFLFLSNLGGSVINEVVLSLLKAGWSREEITTQHLEVPLQAEIMEAADSSFGSSGLLKKHLIDHFIPFLPLEYRHVRLCVRDAFLGQDLPYTEETLDEIAKMMTYVPEEERLFSSQGCKSISQRINLFLP

SEQ ID NO: 675 - protein, 814 aa, Mus musculus
MTSFQEVQLQTSNFAHVIFQNVAKSYLPNAHLECHYTLTPYIHPHSKDWVGIFKVGWSTARDYYTFLWSPMPEHYVEGSTVNCVLAFQGYYLPNDDGEFYQFCYVTHKGEIRGASTPFQFRAASPVEELLTMEDEGNSDMLVVTTKAGLLELKIEKTLKEKEELLKLIAVLEKETAQLREQVGRMERELSQEKGRCEQLQAEQKGLLEVSQSLRVENEEFMKRYSDATAKVQQLEEDIVSVTHKAIEKETDLDSLKDKLRKAQHEREQLECQLQTEKDEKELYKVHLKNTEIENTKLVSEIQTLKNLDGNKESMITHFKEEISKLQSSLADKENLYRALLLTTSNKEDTLFLKEQLRKAEEQVQATRPELIFLTKELSDAVNVRDKTMADLHTARLENERVKKQLADTLAELQLHAVKKDQEKTDTLEHELRREVEDLKLRLQMAADHYREKFKECQRLQKQINKLSDQAASTNSVFTKKMGSQQKVNDASINTDPAASTSASAVDVKPAASCAETGFDMSTKDHVCEMTKEIAEKIEKYNKCKQLLQDEKTKCNKYAEELAKMELKWKEQVKIAENVKLELAEVEDNYKVQLAEKEKEINGLASYLENLSREKELTKSLEDQKGRKLEGQSPQQVSRCLNTCSEQNGLLPPLSSAQTVLQYGNPYSAQETRDGADGAFYPDEIQRPPVRVPSWEDNVVCSQPARNLSRPDGLEDPEDSREDENVPIPPDPANQHLRSHGAGFCFDSSFDVHKKCPLCELMFPPNYDQTKFEEHVESHWKVCPMCSEQFPPDYDQQGFERHVQTHFDQNVLNFD

SEQ ID NO: 676 - protein, 185 aa, Mus musculus
MAPKGGSKQQSEEDLLLQDFSRNLSAKSSALFFGNAFIVSAIPIWLYWRIWHMDLIQSAVLYSVMTLVSTYLVAFAYKNVKFVLKHKVAQKREDAVSKEVTRKLSEADNRKMSRKEKDERILWKKNEVADYEATTFSIFYNNTLFLVLVIVASFFILKNFNPTVNYILSISASSGLIALLSTGSK

SEQ ID NO: 677 - protein, 162 aa, Mus musculus
  MOD_RES (93)..(93): selenocysteine
MAAGQGGWLRPALGLRLLLATAFQAASALGAEFASEACRELGFSSNLLCSSCDLLGQFNLLPLDPVCRGCCQEEAQFETKKLYAGAILEVCGXKLGRFPQVQAFVRSDKPKLFRGLQIKYVRGSDPVLKLLDDNGNIAEELSILKWNTDSVEEFLSEKLERI

SEQ ID NO: 678 - protein, 475 aa, Mus musculus
MTTILTSTFRNLSTTSKWALRSSIRPLSCSSQLHSAPAVQTKSKKTLAKPNMKNIVVVEGVRIPFLLSGTSYKDLMPHDLARAALSGLLHRTNIPKDVVDYIIFGTVIQEVKTSNVAREAALGAGFSDKTPAHTVTMACISSNQAMTTAVGLIASGQCDVVVAGGVELMSDVPIRHSRNMRKMMLDLNKAKTLGQRLSLLSKFRLNFLSPELPAVAEFSTNETMGHSADRLAAAFAVSRMEQDEYALRSHSLAKKAQDEGHLSDIVPFKVPGKDTVTKDNGIRPSSLEQMAKLKPAFIKPYGTVTAANSSFLTDGASAMLIMSEDRALAMGYKPKAYLRDFIYVSQDPKDQLLLGPTYATPKVLEKAGLTMNDIDAFEFHEAFSGQILANFKAMDSDWFAQNYMGRKTKVGSPPLEKFNIWGGSLSLGHPFGATGCRLVMAAANRLRKDGGQYALVAACAAGGQGHAMIVEAYPK

SEQ ID NO: 679 - protein, 222 aa, Mus musculus
MATPQSVFVFAICILMITELILASKSYYDILGVPKSASERQIKKAFHKLAMKYHPDKNKSPDAEAKFREIAEAYETLSDANSRKEYDTIGHSAFTNGKGQRGNGSPFEQSFNFNFDDLFKDFNFFGQNQNTRSKKHFENHFHTRQDGSSRQRHHFQEFSFGGGLFDDMFEDMEKMFSFSGFDTTNRHTVQTENRFHGSSKHCRTVTQRRGNMVTTYTDCSGQ

SEQ ID NO: 680 - protein, 494 aa, Mus musculus
MSTGTFVVSQPLNYRGGARVEPVDASGTEKAFEPATGRVIATFACSGEKEVNLAVENAKAAFKLWSKKSGLERCQVLLEAARIIKERKDEIATVETINNGKSIFEARLDVDTCWQCLEYYAGLAASMAGEHIQLPGGSFGYTRREPLGVCVGIGAWNYPFQIACWKSAPALACGNAMIFKPSPFTPVSALLLAEIYTKAGAPPGLFNVVQGGAATGQFLCHHREVAKISFTGSVPTGVKIMEMSAKGVKPITLELGGKSPLIIFSDCNMENAVKGALMANFLTQGQVCCNGTRVFVQKEIADKFINEVVKQTQKIKLGDPLLEDTRMGPLINAPHLERVLGFVKLAKEQGATVLCGGEVYVPEDPKLKHGYYMTPCILTNCRDDMTCVKEEIFGPVMSILTFGTEAEVLERANDTTFGLAAGVFTRDIQRAHRVAAELQAGTCYINNYNVSPVELPFGGYKKSGFGRENGRVTIEYYSQLKTVCVEMGDVESAF

SEQ ID NO: 681 - protein, 244 aa, Mus musculus
MSTDMETAVVGKVDPEAPQPTHIDVHIHQESALAKLLLAGCSLLRIPASASTQSQGSSRVLVASWVVQTVLGALSVVLGGTLYIGHYLAMYSEGAPFWTGIVAMLAGAVAFLHKKRGGTCWALMRTLLVLASFCTAVAAIVIGSRELNFYWYFLGDDVCQRDSSYGWSTMPRTTPVPEEADRIALCIYYTSMLKTLLMSLQAMLLGIWVLLLLASLTHVCVYIWKRFFTKAETEEKKLLGAAVI

SEQ ID NO: 682 - protein, 333 aa, Mus musculus
MFRAAAPGQLRRAASLLRFQSTLVIAEHANDSLAPITLNTITAAGRLGGEVSCLVAGTKCDKVVQDLCKVAGVAKVLVAQHDAYKGLLPEELTPLILETQKQFSYTHICAGASAFGKNLLPRVAAKLNVAPVSDIIEIKSPDTFVRTIYAGNALCTVKCDEKVKVFSVRGTSFEAAATSGGSASSEKAPSSSSVGISEWLDQKLTKSDPPELTGAKVVVSGGRGLKSGENFKLLYDLADQLHAAVGASRAAVDAGFVPNDMQVGQTGKIVAPELYIAVGISGAIQHLAGMKDSKTIVAINKDPEAPIFQVADYGIVADLFKVVPEMTEILKKK

SEQ ID NO: 683 - protein, 226 aa, Mus musculus
MPVKGGSKCIKYLLFGFNFIFWLAGIAVLAIGLWLRFDSQTKSIFEQENNHSSFYTGVYILIGAGALMMLVGFLGCCGAVQESQCMLGLFFGFLLVIFAIEIAAAVWGYTHKDEVIKELQEFYKDTYQKLRSKDEPQRETLKAIHMALDCCGIAGPLEQFISDTCPKKQLLESFQVKPCPEAISEVFNNKFHIIGAVGIGIAVVMIFGMIFSMILCCAIRRSREMV

SEQ ID NO: 684 - protein, 233 aa, Mus musculus [sequence omitted]

SEQ ID NO: 685 - protein, 296 aa, Mus musculus
MPVTVTRTTITTTTSSSTTVGSARALTQPLGLLRLLQLISTCVAFSLVASVGAWTGPMGNWAMFTWCFCFAVTLIILIVELGGLQAHFPLSWRNFPITFACYAALFCLSSSIIYPTTYVQFLAHGRTRDHAIAATTFSCVACLAYATEVAWTRARPGEITGYMATVPGLLKVFETFVACIIFAFIGEPLLYNQKPALEWCVAVYAICFILAGVTILLNLGDCTNVLPIPFPTFLSGLAYSLFSFTPLPSSSGPSTNLIRDIRANPAVQWIQAALVVLVIYNPTRCVSGTDDWRCPS

SEQ ID NO: 686 - protein, 557 aa, Mus musculus
MYALALFASLLATALTSPVQDPKTCSGGSAVLCRDVKTAVDCGAVKHCQQMVWSKPTAKSLPCDICKTVVTEAGNLLKDNATQEEILHYLEKTCEWIHDSSLSASCKEVVDSYLPVILDMIKGEMSNPGEVCSALNLCQSLQEYLAEQNQKQLESNKIPEVDMARVVAPFMSNIPLLLYPQDHPRSQPQPKANEDVCQDCMKLVSDVQTAVKTNSSFIQGFVDHVKEDCDRLGPGVSDICKNYVDQYSEVCVQMLMHMQDQQPKEICVLAGFCNEVKRVPMKTLVPATETIKNILPALEMMDPYEQNLVQAHNVILCQTCQFVMNKFSELIVNNATEELLVKGLSNACGVLPDPARTKCQEVVGTFGPSLLDIFIHEVNPSSLCGVIGLCAARPELVEALEQPAPAIVSALLKEPTPPKQPAQPKQSALPAHVPPQKNGGFCEVCKKLVLYLEHNLEKNSTKEEILAALEKGCSFLPDPYQKQCDDFVAEYEPLLLEILVEVMDPGFVCSKIGVCPSAYKLLLGTEKCVWGPSYWCQNMETAARCNAVDHCKRHVWN

SEQ ID NO: 687 - protein, 323 aa, Mus musculus
MGSRVSREEFEWVYTDQPHAARRKEILAKYPEIKSLMKPDHNLIWIVAMMLLVQLASFYLVKDLDWKWVIFWSYVFGSCLNHSMTLAIHEISHNFPFGHHKALWNRWFGMFANLSLGVPYSISFKRYHMDHHRYLGADKIDVDIPTDFEGWFFCTTFRKFVWVILQPLFYAFRPLFINPKPITYLEIINTVIQITFDIIIYYVFGVKSLVYMLAATLLGLGLHPISGHFIAEHYMFLKGHETYSYYGPLNLLTFNVGYHNEHHDFPNVPGKNLPMVRKIASEYYDDLPHYNSWIKVLYDFVTDDTISPYSRMKRPPKGNEILE

SEQ ID NO: 688 - protein, 230 aa, Mus musculus
MNEIWLRCDNEKQYAHWMAACRLASKGKTMADSSYNLEVQNILSFLKMQHLNPDPQLIPDQITTDVNPECLVSPRYLKKYKSKQITARILEAHQNVAQMSLIEAKMRFIQAWQSLPEFGITHFIARFQGGKREELIGIAYNRLIRMDASTGDAIKTWRFSNMKQWNVNWEIKMVTVEFADEVRLSFICTEVDCKVVHEFIGGYIFLSTRAKDQNESLDEEMFYKLTSGWV

SEQ ID NO: 689 - protein, 253 aa, Mus musculus
MGEFNEKKATCGTVCLKYLLFTYNCCFWLAGLAVMAVGIWTLALKSDYISLLASSTYLATAYILVVAGVVVMVTGVLGCCATFKERRNLLRLYFILLLIIFLLEIIAGILAYVYYQQLNTELKENLKDTMVKRYHQSGHEGVSSAVDKLQQEFHCCGSNNSQDWQDSEWIRSGEADSRVVPDSCCKTMVAGCGKRDHASNIYKVEGGCITKLETFIQEHLRVIGAVGIGIACVQVFSMIFTCCLYRSLKLEHY

SEQ ID NO: 690 - protein, 1271 aa, Mus musculus
MEATGVLPFVRGVDLSGNDFKGGYFPENVKAMTSLRWLKLNRTGLCYLPEELAALQKLEHLSVSHNHLTTLHGELSSLPSLRAIVARANSLKNSGVPDDIFKLDDLSVLDLSHNQLTECPRELENAKNMLVLNLSHNGIDSIPNQLFINLTDLLYLDLSENRLESLPPQMRRLVHLQTLVLNGNPLLHAQLRQLPAMMALQTLHLRNTQRTQSNLPTSLEGLSNLSDVDLSCNDLTRVPECLYTLPSLRRLNLSSNQIAELSLCIDQWVHLETLNLSRNQLTSLPSAICKLTKLKKLYLNSNKLDFDGLPSGIGKLTSLEEFMAANNNLELIPESLCRCPKLKKLVLNKNRLVTLPEAIHFLTEIQVLDVRENPSLVMPPKPADRTAEWYNIDFSLQNQLRLAGASPATVAAAAAVGSGSKDPLARKMRLRRRKDSAQDVQAKQVLKGMSDVAQEKNKNQEESIDARAPGGKVRRWDQGLEKPRLDYSEFFTEDVGQLPGLTIWQIENFVPVLVEEAFHGKFYEADCYIVLKTFLDDSGSLNWEIYYWIGGEATLDKKACSAIHAVNLRNYLGAECRTVREEMGDESEEFLQVFDNDISYIEGGTASGFYTVEDTHYVTRMYRVYGKKNIKLEPVPLKGSSLDPRFVFLLDQGLDIYVWRGAQATLSNTTKARLFAEKINKNERKGKAEITLLVQGQEPPGFWDVLGGEPSEIKNHVPDDFWPPQPKLYKVGLGLGYLELPQINYKLSVEHKKRPKVELMPGMRLLQSLLDTRCVYILDCWSDVFIWLGRKSPRLVRAAALKLGQELCGMLHRPRHTVVSRSLEGTEAQVFKAKFKNWDDVLTVDYTRNAEAVLQGQGLSGKVKRDTEKTDQMKADLTALFLPRQPPMPLAEAEQLMEEWNEDLDGMEGFVLEGRKFTRLPEEEFGHFYTQDCYVFLCRYWVPVEYEEEEKTEDKEGKASAEAREGEEAAAEAEEKQPEEDFQCIVYFWQGREASNMGWLTFTFSLQKKFESLFPGKLEVVRMTQQQENPKFLSHFKRKFIIHRGKRKVTQGTLQPTLYQIRTNGSALCTRCIQINTDSSLLNSEFCFILKVPFESEDNQGIVYAWVGRASDPDEAKLAEDILNTMFDASYSKQVINEGEEPENFFWVGIGAQKPYDDDAEYMKHTRLFRCSNEKGYFAVTEKCSDFCQDDLADDDIMLLDNGQEVYMWVGTQTSQVEIKLSLKACQVYIQHTRSKEHERPRRLRLVRKGNEQRAFTRCFHAWSTFRQAPA

SEQ ID NO: 691 - protein, 843 aa, Mus musculus
MAKPLTDSERQKQISVRGIAGLGDVAEVRKSFNRHLHFTLVKDRNVATPRDYFFALAHTVRDHLVGRWIRTQQHYYERDPKRIYYLSLEFYMGRTLQNTMVNLGLQTACDEATYQLGLDLEELEEIEEDAGLGNGGLGRLAACFLDSMATLGLAAYGYGIRYEFGIFNQKIVNGWQVEEADDWLRYGNPWEKARPEYMLPVHFYGRVEHTPDGVLWLDTQVVLAMPYDTPVPGYKNNTVNTMRLWSAKAPNDFKLKDFNVGDYIEAVLDRNLAENISRVLYPNDNFFEGKELRLKQEYFVVAATLQDIIRRFKSSRFGCRDPVRTCFETFPDKVAIQLNDTHPALSIPELMRILVDVEKVDWDKAWEITKKTCAYTNHTVLPEALERWPVSMFEKLLPRHLEIIYAINQRHLDHVAALFPGDVDRLRRMSVIEEGDCKRINMAHLCVIGSHAVNGVARIHSEIVKQSVFKDFYELEPEKFQNKTNGITPRRWLLLCNPGLAEIIVERIGEGFLTDLSQLKKLLSLVDDEAFIRDVAKVKQENKLKFSAQLEKEYKVKINPASMFDVHVKRIHEYKRQLLNCLHIITLYNRIKKDPAKAFVPRTVMIGGKAAPGYHMAKMIIKLVTSIGDVVNHDPVVGDRLRVIFLENYRVSLAEKVIPAADLSQQISTAGTEASGTGNMKFMLNGALTIGTMDGANVEMAEEAGEENLFIFGMRVEDVEALDQKGYNAREFYERLPELRQAVDQISSGFFSPKDPDCFKDVVNMLMYHDRFKVFADYEAYIQCQAQVDRLYRNSKEWTKKVIRNIACSGKFSSDRTITEYAREIWGVEPSDLQIPPPNLPKD

SEQ ID NO: 692 - protein, 365 aa, Mus musculus
MGAMAPRTLLLLLAAALGPTQTRAGSHSLRYFVTAVSRPGFGEPRYMEVGYVDNTEFVRFDSDAENPRYEPRARWIEQEGPEYWERETRRAKGNEQSFRVDLRTALRYYNQSAGGSHTLQWMAGCDVESDGRLLRGYWQFAYDGCDYIALNEDLKTWTAADMAAQITRRKWEQAGAAERDRAYLEGECVEWLRRYLKNGNATLLRTDPPKAHVTHHRRPEGDVTLRCWALGFYPADITLTWQLNGEELTQEMELVETRPAGDGTFQKWASVVVPLGKEQKYTCHVEHEGLPEPLTLRWGKEEPPSSTKTNTVIIAVPVVLGAVVILGAVMAFVMKRRRNTGGKGGDYALAPGSQSSDMSLPDCKV

SEQ ID NO: 693 - protein, 310 aa, Mus musculus
MPAMWPLLHVLWLALVCGSVHTTLSKSDAKKAASKMLLEKTQFSDKPVQDRGLVVTDIKAEDVVLEHRSYCSSRARERNFAGEVLGYVTPWNSHGYDVAKVFGSKFTQISPVWLQLKRRGREMFEITGLHDVDQGWMRAVKKHAKGVRIVPRLLFEDWTYDDFRNVLDSEDEIEELSKTVAQVAKNQHFDGFVVEVWSQLLSQKHVGLIHMLTHLAEALHQARLLVILVIPPAVTPGYVQTLKDHRPRVVWDSQAAEHFFEYKKNRGGRHVVFYPTLKSLQVRLELARELGVGVSIWELGQGLDYFYDLL

SEQ ID NO: 694 - protein, 184 aa, Mus musculus
MWPPDAEPEPDPESAHGPRSGRTVPGLRALLPARAFLCSLKGRLLLAESGLSFITFICYVVSSASAFLTVPLLEFLLAVYFLFADAMQLNDKWQGLCWPMMDFLRCVTAALIYFVISITAVAKYSDGAYKAAGVFGFFATIVFAIDFYLIFNEVAKFLKQGDSGNETTAHRTEEENSNSDSDSD

SEQ ID NO: 695 - protein, 263 aa, Mus musculus
MVQSTVTVNGVKVASTHPQSAHISIHIHQKSALEQLLGAVGSLKKFLSWPQARIHYGQLSLGVTQILLGLVSCALGVCLYFGPWTELCAFGCAFWSGSVAILAGVGTIVHEKRQGKLSGQVSCLLLLACIATAAAATVLGVNSLIRQTSVPYYVEIFSTCNPLQSSMDPGYGTVRYSDDSDWKTERCREYLNMMMNLFLAFCIMLTVVCILEIVVSVASLGLSLRSMYGRSSQALNEEESERKLLDGHPAPASPAKEKIPAIL

SEQ ID NO: 696 - protein, 99 aa, Mus musculus
MNSVSTQLILVLASLLLILPVVEAVEAGDAIALLLGVVLSITGICACLWDIRKKAKWTDVTLKDSSELDCTLTSVLKTIVLLRPTPRFDLSRSQQEGYS

SEQ ID NO: 697 - protein, 160 aa, Mus musculus
MLVLLAGLFVVHIATAIMLFVSTIANVWMVADYANASVGLWKNCTGGNCDGSLSYGNEDAIKAVQAFMILSIIFSIISLVVFVFQLFTMEKGNRFFLSGSTMLVCWLCILVGVSIYTHHYAHSEGNFNSSSHQGYCFILTWICFCFSFIIGILYMVLRKK

SEQ ID NO: 698 - protein, 280 aa, Mus musculus
MSEKFDCHYCRDPLQGKKYVQKDGRHCCLKCFDKFCANTCVDCRKPISADAKEVHYKNRYWHDNCFRCAKCLHPLASETFVSKDGKILCNKCATREDFPRCKGCFKAIVAGDQNVEYKGTVWHKDCFTCSNCKQVIGTGSFFPKGEDFYCVTCHETKFAKHCVKCNKAITSGGITYQDQPWHAECFVCVTCSKKLAGQRFTAVEDQYYCVDCYKNFVAKKCAGCKNPITGFGKGSSVVAYEGQSWHDYCFHCKKCSVNLANKRFVFHNEQVYCPDCAKKL

SEQ ID NO: 699 - protein, 2261 aa, Mus musculus
MACWPQLRLLLWKNLTFRRRQTCQLLLEVAWPLFIFLILISVRLSYPPYEQHECHFPNKAMPSAGTLPWVQGIICNANNPCFRYPTPGEAPGVVGNFNKSIVSRLFSDAQRLLLYSQRDTSIKDMHKVLRMLRQIKHPNSNLKLQDFLVDNETFSGFLQHNLSLPRSTVDSLLQANVGLQKVFLQGYQLHLASLCNGSKLEEIIQLGDAEVSALCGLPRKKLDAAERVLRYNMDILKPVVTKLNSTSHLPTQHLAEATTVLLDSLGGLAQELFSTKSWSDMRQEVMFLTNVNSSSSSTQIYQAVSRIVCGHPEGGGLKIKSLNWYEDNNYKALFGGNNTEEDVDTFYDNSTTPYCNDLMKNLESSPLSRIIWKALKPLLVGKILYTPDTPATRQVMAEVNKTFQELAVFHDLEGMWEELSPQIWTFMENSQEMDLVRTLLDSRGNDQFWEQKLDGLDWTAQDIMAFLAKNPEDVQSPNGSVYTWREAFNETNQAIQTISRFMECVNLNKLEPIPTEVRLINKSMELLDERKFWAGIVFTGITPDSVELPHHVKYKIRMDIDNVERTNKIKDGYWDPGPRADPFEDMRYVWGGFAYLQDVVEQAIIRVLTGSEKKTGVYVQQMPYPCYVDDIFLRVMSRSMPLFMTLAWIYSVAVIIKSIVYEKEARLKETMRIMGLDNGILWFSWFVSSLIPLLVSAGLLVVILKLGNLLPYSDPSVVFVFLSVFAMVTILQCFLISTLFSRANLAAACGGIIYFTLYLPYVLCVAWQDYVGFSIKIFASLLSPVAFGFGCEYFALFEEQGIGVQWDNLFESPVEEDGFNLTTAVSMMLFDTFLYGVMTWYIEAVFPGQYGIPRPWYFPCTKSYWFGEEIDEKSHPGSSQKGVSEICMEEEPTHLRLGVSIQNLVKVYRDGMKVAVDGLALNFYEGQITSFLGHNGAGKTTTMSILTGLFPPTSGTAYILGKDIRSEMSSIRQNLGVCPQHNVLFDMLTVEEHIWFYARLKGLSEKHVKAEMEQMALDVGLPPSKLKSKTSQLSGGMQRKLSVALAFVGGSKVVILDEPTAGVDPYSRRGIWELLLKYRQGRTIILSTHHMDEADILGDRIAIISHGKLCCVGSSLFLKNQLGTGYYLTLVKKDVESSLSSCRNSSSTVSCLKKEDSVSQSSSDAGLGSDHESDTLTIDVSAISNLIRKHVSEARLVEDIGHELTYVLPYEAAKEGAFVELFHEIDDRLSDLGISSYGISETTLEEIFLKVAEESGVDAETSDGTLPARRNRRAFGDKQSCLHPFTEDDAVDPNDSDIDPESRETDLLSGMDGKGSYQLKGWKLTQQQFVALLWKRLLIARRSRKGFFAQIVLPAVFVCIALVFSLIVPPFGKYPSLELQPWMYNEQYTFVSNDAPEDMGTQELLNALTKDPGFGTRCMEGNPIPDTPCLAGEEDWTISPVPQSIVDLFQNGNWTMKNPSPACQCSSDKIKKMLPVCPPGAGGLPPPQRKQKTADILQNLTGRNISDYLVKTYVQIIAKSLKNKIWVNEFRYGGFSLGVSNSQALPPSHEVNDAIKQMKKLLKLTKDTSADRFLSSLGRFMAGLDTKNNVKVWFNNKGWHAISSFLNVINNAILRANLQKGENPSQYGITAFNHPLNLTKQQLSEVALMTTSVDVLVSICVIFAMSFVPASFVVFLIQERVSKAKHLQFISGVKPVIYWLSNFVWDMCNYVVPATLVIIIFICFQQKSYVSSTNLPVLALLLLLYGWSITPLMYPASFVFKIPSTAYVVLTSVNLFIGINGSVATFVLELFTNNKLNDINDILKSVFLIFPHFCLGRGLIDMVKNQAMADALERFGENRFVSPLSWDLVGRNLFAMAVEGVVFFLITVLIQYRFFIRPRPVKAKLPPLNDEDEDVRRERQRILDGGGQNDILEIKELTKIYRRKRKPAVDRICIGIPPGECFGLLGVNGAGKSTTFKMLTGDTPVTRGDAFLNKNSILSNIHEVHQNMGYCPQFDAITELLTGREHVEFFALLRGVPEKEVGKFGEWAIRKLGLVKYGEKYASNYSGGNKRKLSTAMALIGGPPVVFLDEPTTGMDPKARRFLWNCALSIVKEGRSVVLTSHSMEECEALCTRMAIMVNGRFRCLGSVQHLKNRFGDGYTIVVRIAGSNPDLKPVQEFFGLAFPGSVLKEKHRNMLQYQLPSSLSSLARIFSILSQSKKRLHIEDYSVSQTTLDQVFVNFAKDQSDDDHLKDLSLHKNQTVVDVAVLTSFLQDEKVKESYV

SEQ ID NO: 700 - protein, 218 aa, Mus musculus
MPMTLGYWNTRGLTHSIRLLLEYTDSSYEEKRYVMGDAPNFDRSQWLSEKFNLGLDFPNLPYLIDGSHKVTQSNAILRYLGRKHNLCGETEEERIRVDTLENQVMDTRIQLMIVCCSPDFEKQKPEFLKAIPEKMKLYSEFLGKRPWFAGDKVTYVDFLAYDILDQYRMFEPKCLDAFPNLRDFLARFEGLKKISAYMKSSRFLPRPVFTKIAQWGTD

SEQ ID NO: 701 - protein, 180 aa, Mus musculus
MRPLTEEETPVMFEKIAKYIGENLQLLVDRPDGTYCFRLHNDRVYYVSEMMLKLAANISGDKLVSLGTCFGKFTKTHKFRLHVTALDYLAPYAKYKVWVKPGAEQSFLYGNHVLKSGLGRITENTSQYQGVVVYSMADIPLGFGVAAKSTQDCRKVDPMAIVVFHQADIGEYVRHEETLT

SEQ ID NO: 702 - protein, 616 aa, Mus musculus
MLVRLTKLSCPAYHWFHALKIKKCLPLCAPRCSSTSAVPQITTHYTVHPREKDKRWEGVNMERFAEEADVVIVGAGPAGLSAAIRLKQLAAEQGKDIRVCLVEKAAQIGAHTLSGACLDPAAFKELFPDWKEKGAPLNTPVTEDRFAILTEKHRIPVPILPGLPMNNHGNYIVRLGHLVSWMGEQAEALGVEVYPGYAAAEVLYHEDGSVKGIATNDVGIQKDGAPKTTFERGLELHAKVTVFAEGCHGHLAKQLYKKFDLRASCDAQTYGIGLKELWIIDEKKWKPGRVDHTVGWPLDRHTYGGSFLYHLNEGEPLVAVGFVVGLDYQNPYLSPFREFQRCKHHPSIQPTLEGGKRIAYGARALNEGGLQSIPKLTFPGGLLIGCSPGFMNVPKIKGTHTAMKSGSLAAESIFKQLTSENLQSKTTGLHVTEYEDNLKQSWVWKELHAVRNIRPSCHGILGVYGGMIYTGIFYWILRGMEPWTLKHKGSDSDQLKPAKDCTPIEYPKPDGQISFDLLSSVALSGTNHEHDQPAHLTLKDDSIPVNRNLSIYDGPEQRFCPAGVYEFVPLEQGDGFRLQINAQNCVHCKTCDIKDPSQNINWVVPEGGGGPAYNGM

SEQ ID NO: 703 - protein, 511 aa, Mus musculus
MSTLLIHHPQYAWLQDLGLREDNEGVYNGSWGGRGEVITTYCPANNEPIARVRQASLKDYEETIGKAKKAWNIWADIPAPKRGEIVRKIGDAFREKIQLLGRLVSLEMGKILVEGIGEVQEYVDVCDYAAGLSRMIGGPTLPSERPGHALIEMWNPLGLVGIITAFNFPVAVFGWNNAIALITGNVCLWKGAPTTSLVSVAVTKIIAQVLEDNLLPGAICSLVCGGADIGTTMARDERVNLLSFTGSTQVGKEVALMVQERFGKSLLELGGNNAIIAFEDADLSLVVPSVLFAAVGTAGQRCTTVRRLFLHESIHNEVVDRLRSAYSQIRVGNPWDPNILYGPLHTKQAVSMFVRAVEEAKKQGGTVVYGGKVMDHPGNYVEPTIVTGLAHDAPIVHQETFAPILYVFKFQDEEEVFEWNNEVKQGLSSSIFTKDLGRIFRWLGPKGSDCGIVNVNIPTSGAEIGGAFGGEKHTGGGRESGSDAWKQYMRRSTCTINYSTSLPLAQGIKFQ

SEQ ID NO: 704 - protein, 432 aa, Mus musculus
MRLPGWLWLSSAVLAACRAVEEHNLTEGLEDASAQAACPARLEGSGRCEGSQCPFQLTLPTLTIQLPRQLGSMEEVLKEVRTLKEAVDSLKKSCQDCKLQADDHRDPGGNGGNGAETAEDSRVQELESQVNKLSSELKNAKDQIQGLQGRLETLHLVNMNNIENYVDNKVANLTVVVNSLDGKCSKCPSQEHMQSQPVQHLIYKDCSDHYVLGRRSSGAYRVTPDHRNSSFEVYCDMETMGGGWTVLQARLDGSTNFTREWKDYKAGFGNLEREFWLGNDKIHLLTKSKEMILRIDLEDFNGLTLYALYDQFYVANEFLKYRLHIGNYNGTAGDALRFSRHYNHDLRFFTTPDRDNDRYPSGNCGLYYSSGWWFDSCLSANLNGKYYHQKYKGVRNGIFWGTWPGINQAQPGGYKSSFKQAKMMIRPKNFKP

SEQ ID NO: 705 - protein, 230 aa, Mus musculus
MCGNNMSAPMPAVVPAARKATAAVIFLHGLGDTGHGWAEAFAGIKSPHIKYICPHAPVMPVTLNMNMAMPSWFDIVGLSPDSQEDESGIKQAAETVKALIDQEVKNGIPSNRIILGGFSQGGALSLYTALTTQQKLAGVTALSCWLPLRASFSQGPINSANRDISVLQCHGDCDPLVPLMFGSLTVERLKALINPANVTFKIYEGMMHSSCQQEMMDVKHFIDKLLPPID

SEQ ID NO: 706 - protein, 784 aa, Mus musculus
MSDLDSSSSSAYPKYLEHLSGDGKAIGVLTSGGDAQGMNAAVRAVVRMGIYTGAKVYFIYEGYQGLVDGGSNIVEAKWDCVSSILQVGGTIIGSARCKAFRSREGRLKAACNLARLGITNLCVIGGDGSLTGANLFRKEWSGLLEELARNGDIDNDTVQKYSYLNVVGMVGSIDNDFCGTDMTIGTDSALHRIIEVVDAIMTTAQSHQRTFVLEVMGRHCGYLALVSALTCGADWVFLPESPPEEDWEENMCLKLSENRARKKRLNIIIVSEGAIDMQNKPITSEKIKELVVKNLGFDTRVTILGHVQRGGTPSAFDRILASRMGVEAVIALLEATPETPACVVSLRGNQAVRLPLMECVQMTQDVQKAMDERRFKEAVKLRGRRFEGNLNTYKRLAIKLPDEKIVKSNCNVAVINVGAPAAGMNAAVRSAVRVGIADGHKMFAIYDGFEGFANGQIKEIGWADVGGWTGQGGSILGTKRTLPGKYLEKIAEQMHSHSINALLIIGGFEAYLGLLELAAAREKHEAFCVPMVMVPATVSNNVPGSDFSIGADTALNTITDTCDRIKQSASGTKRRVFIIETMGGYCGYLANMGALAAGADAAYIFEEPFDIGDLQSNVVHLTEKMKTSIQRGLVLRNESCSVNYTTDFIYQLYSEEGKGVFDCRKNVLGHMQQGGAPSPFDRNFGTKISAKAMEWISAKLKGSQGTGKKFVSDDSICVLGICKRDLLFQPVAELKKVTDFEHRIPKEQWWLKLRPIMKILAKYEASYDMSDSGKLESLQHHEEL

SEQ ID NO: 707 - protein, 294 aa, Mus musculus
MAILVRPRLLAALAPTFLGCLLLQVTAGAGIPEKAFNLTWISTDFKTILEWQPKPTNYTYTVQISDRSRNWKNKCFSTTDTECDLTDEIVKDVTWAYEAKVLSVPRRNSVHGDGDQLVIHGEEPPFTNAPKFLPYRDTNLGQPVIQQFEQNGRKLNVVVKDSLTLVRKNGTFLTLRQVFGKDLGYIITYRKGSSTGKKTNITNTNEFSIDVEEGVSYCFFVQAMIFSRKTNQNSPGSSTVCTEQWKSFLGETLIIVGAVVLLATIFIILLSISLCKRRKNRAGQKGKNTPSRLA

SEQ ID NO: 708 - protein, 412 aa, Mus musculus
MSSKGSVVLAYSGGLDTSCILVWLKEQGYDVIAYLANIGQKEDFEEARKKALKLGAKKVFIEDVSKEFVEEFIWPAVQSSALYEDRYLLGTSLARPCIARRQVEIAQREGAKYVSHGATGKGNDQVRFELTCYSLAPQIKVIAPWRMPEFYNRFKGRNDLMEYAKQHGIPIPVTPKSPWSMDENLMHISYEAGILENPKNQAPPGLYTKTQDPAKAPNSPDVLEIEFKKGVPVKVTNIKDGTTRTTSLELFMYLNEVAGKHGVGRIDIVENRFIGMKSRGIYETPAGTILYHAHLDIEAFTMDREVRKIKQGLGLKFAELVYTGFWHSPECEFVRHCIQKSQERVEGKVQVSVFKGQVYILGRESPLSLYNEELVSMNVQGDYEPIDATGFININSLRLKEYHRLQSKVTAK

SEQ ID NO: 709 - protein, 87 aa, Mus musculus [sequence omitted]

SEQ ID NO: 710 - protein, 199 aa, Mus musculus
MSSGNAKIGYPAPNFKATAVMPDGQFKDISLSEYKGKYVVFFFYPLDFTFVCPTEIIAFSDRADEFKKLNCQVIGASVDSHFCHLAWINTPKKQGGLGPMNIPLISDPKRTIAQDYGVLKADEGISFRGLFIIDDKGILRQITINDLPVGRSVDEIIRLVQAFQFTDKHGEVCPAGWKPGSDTIKPDVNKSKEYFSKQK

SEQ ID NO: 711 - protein, 253 aa, Mus musculus
MGQCGITSSKTVLVFLNLIFWGAAGILCYVGAYVFITYDDYDHFFEDVYTLFPAVVIIAVGALLFIIGLIGCCATIRESRCGLATFVFILLLVFVTEVVVVVLGYVYRAKVENEVDRSIQKVYKTYNGTNSDAASRAIDYVQRQLHCCRIHNYSDWENTDWFKETKNQSVPLSCCRETAKSCNGSLANPSDLYAEGCEALVVKKLQEILMHVIWAALAFAAIQLLGMLCACIVLCRRSRDPAYELLITGGTYA

SEQ ID NO: 712 - protein, 665 aa, Mus musculus
METPSQRRATRSGAQASSTPLSPTRITRLQEKEDLQELNDRLAVYIDRVRSLETENAGLRLRITESEEVVSREVSGIKAAYEAELGDARKTLDSVAKERARLQLELSKVREEFKELKARNTKKEGDLLAAQARLKDLEALLNSKEAALSTALSEKRTLEGELHDLRGQVAKLEAALGEAKKQLQDEMLRRVDAENRLQTLKEELDFQKNIYSEELRETKRRHETRLVEIDNGKQREFESRLADALQELRAQHEDQVEQYKKELEKTYSAKLDNARQSAERNSNLVGAAHEELQQSRIRIDSLSAQLSQLQKQLAAKEAKLRDLEDSLARERDTSRRLLAEKEREMAEMRARMQQQLDEYQELLDIKLALDMEIHAYRKLLEGEEERLRLSPSPTSQRSRGRASSHSSQSQGGGSVTKKRKLESSESRSSFSQHARTSGRVAVEEVDEEGKFVRLRNKSNEDQSMGNWQIRRQNGDDPLMTYRFPPKFTLKAGQVVTIWASGAGATHSPPTDLVWKAQNTWGCGSSLRTALINSTGEEVAMRKLVRSLTMVEDNEDDDEDGEELLHHHRGSHCSGSGDPAEYNLRSRTVLCGTCGQPADKAAGGAGAQVGGSVSSGSYASSVTVTRSFRSVGGSGGGSFGDNLVTRSYLLGNSSPRSQSSQNCSIM

SEQ ID NO: 713 - protein, 749 aa, Mus musculus
MVLPTVLILLLSWAAGLGGQYGNPLNKYIRHYEGLSYNVDSLHQKHQRAKRAVSHEDQFLLLDFHAHGRQFNLRMKRDTSLFSDEFKVETSNKVLDYDTSHIYTGHIYGEEGSFSHGSVIDGRFEGFIKTRGGTFYIEPAERYIKDRILPFHSVIYHEDDINYPHKYGPQGGCADHSVFERMRKYQMTGVEEGARAHPEKHAASSGPELLRKKRTTLAERNTCQLYIQTDHLFFKYYGTREAVIAQISSHVKAIDTIYQTTDFSGIRNISFMVKRIRINTTSDEKDPTNPFRFPNIGVEKFLELNSEQNHDDYCLAYVFTDRDFDDGVLGLAWVGAPSGSSGGICEKSKLYSDGKKKSLNTGIITVQNYGSHVPPKVSHITFAHEVGHNFGSPHDSGTECTPGESKNLGQKENGNYIMYARATSGDKLNNNKFSLCSIRNISQVLEKKRNNCFVESGQPICGNGMVEQGEECDCGYSDQCKDDCCFDANQPEGKKCKLKPGKQCSPSQGPCCTAQCAFKSKSEKCRDDSDCAKEGICNGFTALCPASDPKPNFTDCNRHTQVCINGQCAGSICEKYDLEECTCASSDGKDNKELCHVCCMKKMAPSTCASTGSLQWSKQFSGRTITLQPGSPCNDFRGYCDVFMRCRLVDADGPLARLKKAIFSPQLYENIAEWIVAHWWAVLLMGIALIMLMAGFIKICSVHTPSSNPKLPPPKPLPGTLKRRRPPQPIQQPPRQRPRESYQMGHMRR

SEQ ID NO: 714 - protein, 921 aa, Mus musculus
MPPKAPRRAAAAEPPPPPPPPPREDDPAQDSGPEELPLARLEFEEIEEPEFIALCQKLKVPDHVRERAWLTWEKVSSVDGILEGYIQKKKELWGICIFIAAVDLDEMPFTFTELQKSIETSVYKFFDLLKEIDTSTKVDNAMSRLLKKYNVLCALYSKLERTCELIYLTQPSSALSTEINSMLVLKISWITFLLAKGEVLQMEDDLVISFQLMLCVVDYFIKFSPPALLREPYKTAAIPINGSPRTPRRGQNRSARIAKQLENDTRIIEVLCKEHECNIDEVKNVYFKNFIPFINSLGIVSSNGLPEVESLSKRYEEVYLKNKDLDARLFLDHDKTLQTDPIDSFETERTPRKNNPDEEANVVTPHTPVRTVMNTIQQLMVILNSASDQPSENLISYFNNCTVNPKENILKRVKDVGHIFKEKFANAVGQGCVDIGVQRYKLGVRLYYRVMESMLKSEEERLSIQNFSKLLNDNIFHMSLLACALEVVMATYSRSTLQHLDSGTDLSFPWILNVLNLKAFDFYKVIESFIKVEANLTREMIKHLERCEHRIMESLAWLSDSPLFDLIKQSKDGEGPDNLEPACPLSLPLQGNHTAADMYLSPLRSPKKRTSTTRVNSAANTETQAASAFHTQKPLKSTSLALFYKKVYRLAYLRLNTLCARLLSDHPELEHIIWTLFQHTLQNEYELMRDRHLDQIMMCSMYGICKVKNIDLKFKIIVTAYKDLPHAAQETFKRVLIREEEFDSIIVFYNSVFMQRLKTNILQYASTRPPTLSPIPHIPRSPYKFSSSPLRIPGGNIYISPLKSPYKISEGLPTPTKMTPRSRILVSIGESFGTSEKFQKINQMVCNSDRVLKRSAEGGNPPKPLKNVRFDIEGADEADGSKHLPAESKFQQKLAEMTSTRTRMQKQRMNESKDVSNKEEK

SEQ ID NO: 715 - protein, 197 aa, Mus musculus
MSGSSRRLLWAATCLAVLCVSAAQPNITTLAPNVTEVPTTTTKVVPTTQMPTVLPETCASFNSCVSCVNATFTNNITCFWLHCQEANKTYCANEPLSNCSQVNRTDLCSVIPPTTPVPTNSTAKPTTRPSSPTPTPSVVTSAGTTNTTLTPTSQPERKSTFDAASFIGGIVLVLGVQAVIFFLYKFCKSKERNYHTL

SEQ ID NO: 716 - protein, 625 aa, Mus musculus
MNTSLEQSGCYSNRETLLRCSDARRELELAIGGVLRAEQQIKDNLREVKAQIHSCISRHLECLRSREVWLNEQVDLIYQLKEETLQQQAQQLYWLMGQFNCLIHQLEYTQNKDLANQVSVCLERLGSLALKPEDSTVLLFEADTSALRQTITTFGSLKTIQIPEHLMAHASSSSIGPFLEKRGYIQVPEQKSASSGTAVSLSEWLLVSKPAIGLQAPYVPSTNPQDWLIPKQTSENSQTSARACSFFSDAWGNLKGLENWLLNSHQQEIAGKPSSSKCNSHCSTSSFSPEAEKAEDVELLDQDELDLSDWLVTPQEPCELEKPVDGSWETSEKFKLLFQVFREPYNVSDWLVKPDSCTNCQGNQPRGVEIENLGNLKCLNDHLEAKKSVSVPGATISDGWLAQNHQDTWKVEEVCKANEPCTSFAECVCDDNCEKEAMYKWLLKKGGKDKNGMPMEPKSEPEKHRESLTLWLCPSRNELTEQAKAPKAMAPARIADSFHVIKNSSLSEWLMGPTCKGGPKDVPNTEERAGKEMLQSSMATSWCPFNTADWVLPGKKVGSLSQFPSGEDKWLLRKKAQEAFLNSPLQEERNFRPDCYGLPAVCDLFACMQLKVDKEKWLYRTPLQM

SEQ ID NO: 717 - protein, 505 aa, Mus musculus
MGRFAAALVGSLFWLGLLLCGLGSLASAEPRAPPNRIAIVGAGIGGTSSAYYLRKKFGKDVKIDVFEREEVGGRLATLKVQGHDYEAGGSVIHPLNLHMKRFVKELGLSSVPASGGLVGVYNGKSLVFEESSWFVINVIKLVWRYGFQSLRMHMWVEDLLDKFMRIYRYQSHDYAFSSVEKLMHAIGGDDYVRLLNQTLRENLKKAGFSETFLNEMIAPVMKVNYGQSTDINAFVGAVSLTAADSNLWAVEGGNKIVCSGLLQASSSNLISGSVMSIEEKTRTKQTGNPTKMYEVVYKTGSETHSDFYDIVLVAAPLNRKMSNITFRNFDPPIEEFNDPYQQLVTTFIKGELNSTLFSSRPKDQFGLSAILVTDDSDMFINSLSIVASVRQKEGPPPAVDGMHVWKTFSRDILTKEQISKLFLSYDYAVRKPWLSYPHYEPPQKCPSIILHDRLYYLNGIEFAASCMEMSAIAGYNAALLAYHRWNGNEDMIDQDDLYERLKTEL

SEQ ID NO: 718 - protein, 335 aa, Mus musculus
MAASLGFRGAASGLWYWSGRRRPVGSLAAVCSRSMASKTPVGFIGLGNMGNPMAKNLMKHGYPLILYDVFPDVCKEFKEAGEQVASSPAEVAEKADRIITMLPSSMNAVEVYSGANGILKKVKKGSLLIDSSTIDPSVSKELAKEVEKMGAVFMDAPVSGGVGAARSGNLTFMVGGVEDEFAAAQELLECMGSNVVYCGAVGTGQSAKICNNMLLAISMIGTAEAMNLGIRSGLDPKLLAKILNMSSGRCWSSDTYNPVPGVMHGVPSSNNYQGGFGTTLMAKDLGLAQDSATSTKTPILLGSLAHQIYRMMCSKGYSKKDFSSVFQYLREEEPF

SEQ ID NO: 719 - protein, 269 aa, Mus musculus
MGCFECCIKCLGGVPYASLVATILCFSGVALFCGCGHVALAGTVAILEQHFSTNTSDHALLSEVIQLMQYVIYGIASFFFLYGIILLAEGFYTTSAVKELHGEFKTTACGRCISGMFVFLTYVLGVAWLGVFGFSAVPVFMFYNIWSTCEVIKSPQSNGTSGVEQICVDVRQYGIIPWNAFPGKICGSALENICNTNEFYMSYHLFIVACAGAGATVIALIHFLMILSSNWAYLKDASKMQAYQDIKAKEEQELQDIQSRSKEQLNSYT

SEQ ID NO: 720 - protein, 210 aa, Mus musculus
MVCGGFACSRNALCALNVVYMLVGFLLIGVAAWGKGLGVVSSIHIIGGVIAVGVFLLLIAVAGLVGAANHHQVLLFFYMIILGLVFIFQFGISCSCLAINRNTQADVINASWSVLSNSTRHELERSFDCCGLFNLTTLRLQDDTSCSAVCKTKSSTCQMCGERFLKHSDKALKILGGVGLFFSFTEILGVWLAMRFRNQKDPRANPSAFL

SEQ ID NO: 721 - protein, 181 aa, Mus musculus
MATPWRRALLMILASQVVTLVKCLEDDDVPEEWLLLHVVQGQIGAGNYSYLRLNHEGKIILRMQSLRGDADLYVSDSTPHPSFDDYELQSVTCGQDVVSIPAHFQRPVGIGIYGHPSHHESDFEMRVYYDRTVDQYPFGEAAYFTDPTGASQQQAYAPEEAAQEEESVLWTILISILKAGA

SEQ ID NO: 722 - protein, 544 aa, Mus musculus
MRLPSAAGPRPGRPRRLPALLLLPLLGGCLGLVGAARRPNVLLLLTDDQDAELGGMTPLKKTKALIGEKGMTFSSAYVPSALCCPSRASILTGKYPHNHHVVNNTLEGNCSSKAWQKIQEPYTFPAILKSVCGYQTFFAGKYLNEYGAPDAGGLEHIPLGWSYWYALEKNSKYYNYTLSINGKARKHGENYSVDYLTDVLANLSLDFLDYKSNSEPFFMMISTPAPHSPWTAAPQYQKAFQNVIAPRNKNFNIHGTNKHWLIRQAKTPMTNSSIRFLDDAFRRRWQTLLSVDDLVEKLVKRLDSTGELDNTYIFYTSDNGYHTGQFSLPIDKRQLYEFDIKVPLLVRGPGIKPNQTSKMLVSNIDLGPTILDLAGYDLNKTQMDGMSLLPILKGDRNLTWRSDVLVEYQGEGRNVTDPTCPSLSPGVSQCFPDCVCEDAYNNTYACVRTLSSLWNLQYCEFDDQEVFVEVYNITADPDQITNIAKSIDPELLGKMNYRLMMLQSCSGPTCRTPGVFDPGYRFDLRLMFNSHGSVRTRRFSKHPL

SEQ ID NO: 723 - protein, 706 aa, Mus musculus
MGKDSQNYYGKHGTPQKYDPTFKGPIYNRGCTDVICCVLLFLAIVGYVAVGIIAWTHGDPRKVIYPTDSRGEFCGQKGTKNADKPFLFYFNIVKCANPLVLLEFHCPTPQICVKQCPDRYLTLLSARNTRDFDYYKQFCVPGFQNNKGVTEILRDGECPAVITPSKPLAQRCFPAIHASKGVLMVGNETTYEDGHGARKNITDLVEGAKKANKILEARQLAMQIFEDYTVSWYWIIIGLVIAMVLSLLFIVLLRFLAGIMVWVMIVMVILVLGYGIFHCYMEYSRLRGEAGSDVSLVDLGFQTDLRVYLHLRQTWMAFMIILSILEVVIILLLIFLRKRILIAIALIKEASRAVGHVMCSLLYPLVTFFLLCLCIAYWASTSVFLSTSNTAVYKVVDDTACPLLRKTCNPETFPLRNESLQCPTARCQFAFYGGESTYHRALLGLQIFNAFMFFWLANFVLALGQVTLAGAFASYYWAMRKPDDMPAFPLFSAFGRALRYHTGSLAFGSLILAIVQIIRVMLEYLDQRLKAAQNKFAKFLMVCLKCCFWCLEKFIKFLNRNAYIMIAIYGTNFCTSARNAFFLLMRNIIRVAVLDKVTDFLFLLGKLLIVGSVGILAFFFFTHRIRIVQDTAPPLNYYWVPILTVIIGSYLIAHGFFSVYGMCVDTLFLCFLEDLERNDGSAERPYFMSSTLKKLLNKTNKKVAES

SEQ ID NO: 724 - protein, 484 aa, Mus musculus
MPEKRGSAQAASGSWLQGFGHPSVYHAAFVIFLEFFAWGLLTTPMLTVLHETFPQHTFLMNGLIQGVKGLLSFLSAPLIGALSDVWGRKPFLLGTVFFTCFPIPLMRINPWWYFGMISVSGVFSVTFSVIFAYVADFTQEHERSTAYGWVSATFAASLVSSPAIGTYLSANYGDSLVVLVATLVALLDICFILIAVPESLSEKIRPASWGAQISWKQADPFASLKKVGKDSTVLLICITVFLSYLPEAGQYSSFFLYLRQVIGFGSVKIVAFIAMVGILSIVAQTVFLSKLMRSLGNKNTVLLGLGFQMLQLAWYGFGSQAWMMWAAGTVAAMSSITFPAVSALISRNAESDQQGVAQGIVTGIRGLCNGLGPALYGFIFYMFHVELSELGPKLNSDDDPLQGAFIPGPPFLFGACIVLMSFLVALFIPEYRKTSGVQKHNNSTSGSLSTPPERGSDEDIEPLLQDSSIWELSFEEPGNQCTEL

SEQ ID NO: 725 - protein, 428 aa, Mus musculus
MRALCLLCWAVLLNLVRACPEPCDCGEKYGFQIADCAYRDLEGVPPGFPANVTTLSLSANRLPGLPEGAFREVPLLQSLWLAHNEIRSVAIGALAPLSHLKSLDLSHNLLSEFAWSDLHNLSALQLLKMDSNELAFIPRDAFSSLSALRSLQLNHNRLHALAEGTFAPLTALSHLQINDNPFDCTCGIVWFKTWALASAVSIPEQDNIACTTPHVLKGIPLGRLPPLPCSAPSVQLSYQPSQDGAELRPGFVLALHCDVDGQPVPQLHWHIHTPGGTVEIASPNVGTDGRALPGALATSGQPRFQAFANGSLLIPDFGKLEEGTYSCLATNELGSAESSVNVALATPGEGGEDAVGHKFHGKAVEGKGCYTVDNEVQPSGPEDNVVIIYLSRAGPPEAAIAADGRPAQQFSGILLLGQSLLVLSFFYF

SEQ ID NO: 726 - protein, 519 aa, Mus musculus
MYLLPLPAAARVALRRLGVRGLWDRGLSTADMTKGLVLGIYAKDKDDDLPQFTSAGESFNKLVSGKLREMLNISGPPLKAGKTRTFYGLHQDFPSVVVVGLGKRSAGVDDQENWHEGKENIRDAVAAGCRQVQDLELPSVEVDPCGDAQAAAEGAVLGLYEYDDLKQKKKVAVSAKLHGSGDLEAWEKGVLFASGQNLARHLMESPANEMTPTRFAEIIEKNLKSASSKTKVHIRPKSWIEEQEMGSFLSVAKGSEEPPVFLEIHYMGSPNATEAPLVFVGKGITFDSGGISIKASANMDLMRADMGGAATICSAIVSAAKLNLPINIIGLAPLCENMPSGKANKPGDVVRARNGKTIQVDNTDAEGRLILADALCYAHTFNPKVIINAATLTGAMDVALGSGATGVFTNSSWLWNKLFEASVETGDRVWRMPLFEHYTRQVIDCQLADVNNLGKYRSAGACTAAAFLREFVTHTKWAHLDIAGVMTNKDEIPYLRKGMSGRPTRTLIEFLLRFSKDSS

SEQ ID NO: 727 - protein, 917 aa, Mus musculus
MSAPRIWLAQALLFFLTTESIGQLLEPCGYIYPEFPVVQRGSNFTAICVLKEACLQHYYVNASYIVWKTNHAAVPREQVTVINRTTSSVTFTDVVLPSVQLTCNILSFGQIEQNVYGVTMLSGFPPDKPTNLTCIVNEGKNMLCQWDPGRETYLETNYTLKSEWATEKFPDCQSKHGTSCMVSYMPTYYVNIEVWVEAENALGKVSSESINFDPVDKVKPTPPYNLSVTNSEELSSILKLSWVSSGLGGLLDLKSDIQYRTKDASTWIQVPLEDTMSPRTSFTVQDLKPFTEYVFRIRSIKDSGKGYWSDWSEEASGTTYEDRPSRPPSFWYKTNPSHGQEYRSVRLIWKALPLSEANGKILDYEVILTQSKSVSQTYTVTGTELTVNLTNDRYVASLAARNKVGKSAAAVLTIPSPHVTAAYSVVNLKAFPKDNLLWVEWTPPPKPVSKYILEWCVLSENAPCVEDWQQEDATVNRTHLRGRLLESKCYQITVTPVFATGPGGSESLKAYLKQAAPARGPTVRTKKVGKNEAVLAWDQIPVDDQNGFIRNYSISYRTSVGKEMVVHVDSSHTEYTLSSLSSDTLYMVRMAAYTDEGGKDGPEFTFTTPKFAQGEIEAIVVPVCLAFLLTTLLGVLFCFNKRDLIKKHIWPNVPDPSKSHIAQWSPHTPPRHNFNSKDQMYSDGNFTDVSVVEIEANNKKPCPDDLKSVDLFKKEKVSTEGHSSGIGGSSCMSSSRPSISSNEENESAQSTASTVQYSTVVHSGYRHQVPSVQVFSRSESTQPLLDSEERPEDLQLVDSVDGGDEILPRQSYFKQNCSQPEACPEISHFERSNQVLSGNEEDFVRLKQQQVSDHISQPYGSEQRRLFQEGSTADALGTGADGQMERFESVGMETTIDEEIPKSYLPQTVRQGGYMPQ

SEQ ID NO: 728 - protein, 809 aa, Mus musculus
MVTTKMTAAFRNPNRRQVATDKVAEKLSSTLSWVKNTVSHTVSQMASQVASPSASLHTTSSSTTLSTPTQSPSSPSKLSPDDLELLAKLEEQNRLIETDSKSLRSVNGSRRNSGSSLVSSSSASSNLSHLEEDSWILWGRIVNEWDDVRKKKEKQVKELVRKGIPHHFRAIVWQLLCNAQSMTIKDQYSELLKMTSPCEKLIRRDIARTYPEHNFFKEKDSLGQEVLFNVMKAYSLVDRELVTVRAVLSSLDCCCMQMPEEEAFCVFVKLMQDYRLRELFKPSMAELGLCMYQFECMIQEYLPELFVHFQSQSFHTSMYASSWFLTIFLTTFPLPIATRIFDIFMSEGLEIVFRVGLALLQMNQAELMQLDMEGMLQHFQKVIPHQFDGGPEKLIQSAYQVKYNSKKMKKLEKEYTTIKTKEMEEQGEIKRLRTENRLLKQRIETLEKHKCSSTYNEDFVLQLEKELVQARLSEAESQCALKEMQDKVLDIEKKNNSFPDENNIARLQEELIAVKLREAEAIMGLKELRQQVRTLEEHWQRHLARTSGRWKDPPKKNAVNELQDELMSIRLREAETQAEIREMKQRMMEMETQNQINSNQLRRAEQEVNSLQEKVCSLSVKNKGLLAQLSEAKRRQAEIECKNKEEVMAVRLREADSIAAVAELQQHIAELKIQKEEGKLQGQLNRSDSNQYIRELKDQIAELTHELRCLKGQRDFSSRPPFDGIHIVSHLIGDDELFHSSDEDFIDSSLQESAIGFPLHRKSGPMSLNPALADGSESEAEDGMLGPQESDPEAPQKQPPQRESYSTTV

SEQ ID NO: 729 - protein, 334 aa, Mus musculus
MALTMLLLLVAAALTLIETRAGQHSLQYFHTAVSRPGLGEPWFISVGYVDDTQFVRFDSDAENPRMEPRARWMEQEGPEYWERETQIAKGHEQSFRGSLRTAQSYYNQSKGGSHTLQWMYGCDMGSDGRLLRGYLQFAYEGRDYIALNEDLKTWTAVDMAAQITRRKWEQAGIAEKDQAYLEGTCMQSLRRYLQLGKETLLRTDPPKAHVTHHPRSYGAVTLRCWALGFYPADITLTWQLNGEELTQDMELVETRPAGDGTFQKWASVVVPLGKEQNYTCHVNHEGLPEPLTLRWGRWEPPPYTVSNMATIAVVVDLGAVAIIGAVVAFVMNRR

SEQ ID NO: 730 - protein, 8612 aa, Mus musculus
MSSSDEETLSERSCRSERSCRSERSYRSERSGSLSPCPPGDTLPWNLPLHEQKKRKSQDSVLDPAERAVVRVAGKNDPQRLLAGCCRVEGVWVSVHLHGEVEVFGEADFSQIAFRLIVGFRLFLDNSLFPGFFVVVPFPSASRISPGWGSPLSWFWSRVALAPANRSQEKEFVQAYEDVLERYKGGGVGLEGDALIRFPGASFPAVALRGSPARPLLSPCLFGGVAREPRTPSIRGVLGGRVGGVAEIKIGLGARISAPEGWLAKQFSELMSNLRRVLAEKVLTGQQGCGLPFPNRPEWKAGDWVCAREVCRQRKYLCFRLCFLLCCSDSCESGERDNERDRVQKKTFTKWVNKHLMKVRKHINDLYEDLRDGHNLISLLEVLSGIKLPREKGRMRFHRLQNVQIALDFLKQRQVKLVNIRNDDITDGNPKLTLGLIWTIILHFQKRVRFKRKWRGKKILTPEASHREEALEGTGVIEETETLTKLTARLPKEPGVGGAEHPPSDIFLPGDSAPNSGVGDQGMIVQVKESFQAEIQTAHLLLENESSVVGGAWDSLEEGMTVIAHLLDNPAERNCEKSSDLSVSGITVSILPSSSGYGSDGLRLHGIRPEDTEPEKTSTPFSEEDGISKWSVVSSKDLGVFQTYPYMGSISDIYISGESGDMSAKEKLLLWTQKVTAGYTGVKCTNFSSCWSDGKMFNALIHRYRPDLVDMERVQVQSNRENLEQAFEVAERLGVTRLLDAEDVDVPSPDEKSVITYVSSIYDAFPKVPEGGEGISATEVDSRWQEYQSRVDSLIPWIRQHTILMSDKSFPQNPVELKALYNQYIHFKETEILAKEREKGRIKELYKLLEVWIEFGRIKLPQGYHPNHVEEEWGKLIVEMLEREKSLRPAVERLELLLQIANKIQNGALNCEEKLTLAKNTLQADAAHLESGQPVQCESDVIMYIQECEGLIRQLQVDLQILRDEKYYQLEELAFRVMRLQDELVTLRLECTNLYRKGHFSSLELVPPSTLTTTHLKAEPLNKTTHSSSTSWFRKPMTRTELVSISSSEDEGNLRFVYELLSWVEEMQMKLERAEWGNDLPSVELQLETQQHIHTSVEELGSSVKEARLYEGKMSQNFHTSYVETLGKLETQYCKLKETSSFRMRHLQSLHKFVSRATAELIWLNGKEEEELACDWSDSNPNISAKKTYFSHLFYKIKFNLQELTMELEGKQDVFRSLQDTAEVLSLENHPAKQTVEAYSAAVQSQLQWMKQLCLCVEQHVKENAAYFQFFSDARDLESFLRNLQDSIKRKYTCDRSTSLSRLEDLLQDSMDEKEQLIQSKSSVASLVGRSKTIVQLKPRNPDHVLKSTLSVKAICDYRQIEVRMHQITICKNDECVLEDNSQRTKWKVISPTGNEAMVPSVCFLIPPPNKEAIEMASRVEQSYQKVMALWHQLHINTKSLISWNYLRKDLDTVQTWSLEKLRSLAPGECHQVMKNLQAHYEDFLQDSHDSALFSVADRLRIEEEVEACKAHFQHLMKSLENEDKEETLAKVYISELKNIRLLLEECEQRLLKQIQSPASSKTDRDARQDITLRIAEQEHTQEDLQHLRSDLDAISMKCNVFLQQSPSGSSATTLRSELNLMVEKMDHVYGLSTVYLNKLKTIDVIVRSMQDAELLVKGYEIKLSQEEAVPADLSALESHRTTLQHWLSDVKDKNSVFSVLDEEITKAKKVAEQLRHPASEPNLDLERYQEKGSQLQERWHRVIAQLETRQSEVESIQEVLRDYRACHGTLIKWIEETTAQQEMMKPGQAEDSRVLSEQLSQQTELFAEIERNQTKLDQCQKFSQQYSTIVKDYELQLMTYKAFVESQQKSPGKRRRMISSSDAITQEFMDLRTRYTALVTLTTQHVKYISDALRRLEEEEKVVEEEKQEHVEKVKDLLGWVSTLARNTQGTTTSSHTSASADIEKAILEQQVLAEELTTKKEQVSEAIKTSQIFLAKHGHKLSEGEKEQISEQLRVLNKTYHDLCDGSANQLQQLQSELAQQTEQKGCRAVAGVIDLGTVEIFPIFRAMQKGLIDQDTGLVLLESQIIMSGLIDPENSEKLSLEEGLTRNFINLPIYQQLLGLRDSLSLVSRLTGTLGSLSVVEAIEKKIISERLGLKVLEVHLATGGFSLPPSENCINLEEAFHQGFIASSLHSELQSHLRSSKNLIDPNTAEKVGLLDLMQRCIIHQESGLKLLPVKQLAGGMVSLKSGRKVSIFRAVQEGLIDRQVTVRLLEAQLFAGGIVDPRTGHRLTVEEAVRHNLIDQDMACAILIRQLQTGGIIDTVTGDRMTIDEAVTNNLVAAKIALVILESLWSFMGLLLPESGEILPITDALEQGIVSTELAHKILHNRQQIEALFLPTLTEIWSWEKATESGILDKDLVNNLRSVCIPDMMPHIQLADSAEQSKVGFAAGKPPVSGPREEGSSHGEKLLFQLMTHSYIHAHTGQRLLLLDQELVEMLTSRDDCQVILPEVFEIQHQRLNTSEALQELYTGTISQISSAKHPRKPCESQFLSQNKDYPSQENCTEAKGERSVVGIECSPAESPERELFLKEQEAIIENVGSLKVINKVKLKLQRPLLGSRKEEQAETLREENISGDPLLVECPEESEGKDLSTEKSKCQTPTKCSFTCHKEQVKTIKDIPSETGTSLIKSQNQMSQFQVDTSVGLRSEFKSEHDMNVNSLEKELKEELLVKDGHKQSQEGQSVADGQTVALEKTDTEDNADEPALLHSSPFEDATLSTLSAQLQDGGIFNEETGQKLLLNEAIAQGLVSSHTAVKLMGKLNMFRGFFDSQTCESLTTEEVIDEGLMDEKLLYNVLMSDKAISGILDPRTHSLCSVKEAVAAGLLDKETATRILEGQVITGGIVDLKRGKKLSVTLASNLGLVDTADQTELINLEKATKGRGAEKAVKERLIELQMETAGLMDPESKAPLTVLQSIDRGILEREAAVYLLTKQVLDGGIIHHISGLRLSVDNAFKHGLIGEDMARQLRKVENFIHYQFFHPQTKEALSFSEAIKLDLVSPDLKREIQEIQDFSGNLGDFIYGQKLTLAKTNKEESLANKTELPSGVMHGVIDPENCTIIPYSELVKKCRIDTESGWRYLEVIPFSDIKDEAGNNVLTPPEAIQLGKVDFASALKVLEAQANTGGIIDMATGKRVTLASALEKKLLDENMARIIASHQMLSGGIIDIYSDQRVTLNDAVEKRLISPELAAMIQVDPLAEQGGTGKLPTRTVQSENIRQHDAVIPAISEIREEMALSLPCSVVKVDGKIPKEKHKEILGDEQGPFMAIPSGKGIEGVNPEPCRATQELDRELKDLSTVVSQELECVDRIVISQPQEVPAQLLKALEKDAKNLQKSLDSVSDSWSSRFLHLQSAVEVKKATVLNRHKELQGKLQDLRAWVGRASLTLNSKGCDTETDADSLSHTLQPYKDMKQSMAERKSQLDALALDIQLFISEHPQDLSLQQNQEMLQFLSELQRSFQGLVEHTAAQKDVVQGHLQQVQQEVQVKTLQKQQDTCHKKLEDLCNWVGQAERALERHQGGASRQELPALQQNQSDLKDLQGDIQSHSTSFATAVKDIEGFLEENQTKLSPQELTALREKLHQAKEQYEVLQERTRVAQKELEEAVTSALQQETEKVAGLLLVFQRHIGAVFRVTEEVFRMECLRVLTGIPLDFRVKQRQSWQRTRGRSMLSWIGWLLWGHLRESHRLAFQEWSSSLELALEKQTLAATDGHVDVNQVPETLDRQYELMKARHQELLSQQQNFIVATQSVQSFLDQHSHNLTPEERQKLQEKLGELKEQYAASLARSEAELKQTQALRDELQKFLQDHKEFENWLQQSENELDSMHKGGSSPEALNSLLKRQGSFSEDVISHKGDLRFVTISGQKVLETENNFEEGQEPSATRNLVNEKLKDATERYTTLHSKCIRLGSHLSMLLGQYQQFQSSADSLQAWVLTCEASVGKLLSDTVASDPGVLQQQLATTKQQLQEELAEHQVPVEKLQKAAHDLLDIEGEPALDCRPIQETTDSISSRFQNLSCSLDERSALLQKAIAQSQSVQESMESLLQSIREVEQNLERDQVASLSSGVIQEALANNMKLKQDIARQKSSLEATHDMVTRFMETADSNSASVLQGKLAELSQRFQQLQLQQQEKESNLKKLLPQAEMFEQLSNKLQQFMENKSRLLASGNQPDQDIAHFSQQIQELTLAMEDQKENLDTLEHLVTTLGSCGFALDLSQHQDKIQNLKKDFTELQKTVQEREKDASTCQEQLDEFRKLIRTFQKWLKETEGNVPPAKTFVSAKELEKQIEHLKDLISDWESKGALLGEINAKGTALESLIMDITAPDSQAKTGSILPPVGSSVGSVNGYHTCKDLTEIQCDMFDVNSKYEKLWEVLRERQESLQTVFSRMEEVQKEASSVLQWLESKEEVLKAMDATLSPTKTETVKAQAESNKAFLAELEQNSPKIQKVKEALAGLLKTYPNSQEAENWKKMQEDLNSRWEKATEVTVARQKQLEESASHLACFQAAESQLRPWLMEKELMMGVLGPLSIDPNMLNAQKQQVQFMLKEFEARRQQHEQLNEAAQGILTGPGDMSPSASQVHKDLQSISQKWVELTDKLNSRSSQIDQAIVKSTQYQDLLQDLSEKVKAIGQRLSGQSAISTQPEAVKQQLEETSEIRSDLGQLDNEIKEAQTLCQELSLLIGEQYLKDELKKRLETVALPLQGLEDLAADRMNRLQAALASTQQFQQMFDELRTWLDEKQSQQAKNCPISAKLERLQCQLQENEEFQKNLNQHSGSYEVIVAEGEALLLSVPPGEEKKTLQNQLVELRSHWEDLSKKTANRQSRLKDCMQKAQKYQGHVEDLVPWIDECKSKMSELQVTLDPVQLESSLLRSKAMLNEAEKRRSLLEILNSAADILINSSEIDEDEIRDEKAGLNQNMDAITEELQAKTSSLEEMTQRLKEFQESFKNIEKKVEGAKHQLEIFDALGSQACSNKNLEKLKAQQEVLQALEPQVDYLRNFTQGLVEDAPDGSDASPLVHQAEVAQQEFLEVKQRVSSSCLTMENKLEGIGQFHCRVREMFSQLADLDDELDGMGAIGRDTDSLQSQIEDVRLFLNKIQALRFDIEDSEAECRKMLEEEGTLDLLGLKRELEALNKQCGKLTERGKVRQEQLELTLGRVEDFYRKLKALNDAATAAEEGEALQWIVGTEVDVINQQLADFKMGPPSGPSHYRLVVGAAGAPLLGSPLGWAPIPPVGKKRGRRGRASVVRAGLSFVRGFARHDQDCPSPLTLAGGDTITPVGEEGKGEEIRPPPEHFQPAACERAARRERGGLAPLVRPERSLLFPARSLHAGTVTAAGGEDGCRAGGVVEKRGDCLSCSPRRGGWGPGTCSGRGGGAHRTRDLLLPEGQTNFLSARPKAGPPGATCKVARSIYDTMRINEQIDQGSKLNQTSKSTMEKMEGSTISSNGTLGASSNVFEARGPEGKKLDERIIFDALKLSSDVQKSAPVPPRRRPNAERKDNVNRRSWKSFMPPNFPEFAERMEASLSEVSEAGASNPSLQEKKESSSALTESSGHFDHREPQSESVTLEHMSKSVDIPEVQNVKNLRDCQDFKFQQHSESSPHEFQPLGSEAAAASGNTDEMQEHRFSSATWPRAMKSSSKGGFSEKQYPLGDTACAVELPPLSPCLSEELLDPELHMLITPSLREKTESELKFEEDERWIMMEAEEEWEEEKLSEERKSLVTNEETSLADPLEESDQANSVPAVEDGSDRVAVSGTSDHLALHQMCCSVDLQPTRDQLASVPRGSPPDCTCVPAGDTVISEVKNRPDQGLEGLTSGLQCPVEAEQLSDTDSVQMFLELEKECLCEEGVTSSAELLSQASSEGLAPTQDAEDSLLISHFPGAALEQEQHVGFLSVRIKDPDTGLDGEYCNALDSSQVPKAVELCAQPDSGRDASTISKECEKVPFSPKIGGEFKLLADLEPHSELDTGGLLNSNLRASCEENLPVFIASELAKENGNLSQVDCSQTEGNVEEYMERIPLSFAFNYEQDVTSGPEVEVFSSDSNLLTDEIHLESGKGALISQEDSNLASLGNVDLCELSMEKVCDKDGETKEPGCQGKLLGNGAPAQFPTDFQRRSSESEVLSLHLLAGELRLNKAGAETMSDREPQLSMALSQEGELEMRDLDSTLNIFPEEQISKASNTVPGLEEWISSQQRPVPAAVVPMVENALDAVTPMPGEDIPAVALTASEGPAANASASDGTAAATPIVPIPEEDIPGASVVILVEDVMTAAISAPEQAAASSGAVPPVETVTVPIIDEDVTSEEPDTQAAEMFLPEEPAIPTPAGPTAEEPDTPTVPVSTAEEPSMPPPAGPTPEESAAPTLKEPTPEKPDTQVLFQKDQVDPLQVKLQQVNGLGQGLIQSAGKNCDVQGLEHDMDEINTRWNTLNKKVAQRIAQLQEALLHCGKFQDALEPLLSWLTDTEELIANQKPPSAEYKVVKAQIQEQKLLQRLLDDRKATVDMLQAEGGRIAQSAELADREKITGQLESLERRWTDLLSKAAARQKQLEDILVLAKQFHETAEPISDFLSVTEKKLANSEPVGTQTAKIHQQIIRHKALEEEIENHATDVHQAVKIGQSLSSLTCPAEQGIMSEKLDSLQARYSEIQDRCCRKASLLEQALFNARLFGEDEVEVLNWLAEVEDKLSTVFVKDYRQDVLQKQHADHLALNEEIINRKKNVDQAIKNGEEVLLIQEKLDGIKTRYADITLTSSKALRTLEQARQLATKFHSTYEELTGWLREAEEELAASGGQSPTGEQIPQFQQRQKELKKEVMEHRLVLDTVNEVSHALLELVPWRAREGLDKLVSDANEQYKLISDTVGQRVDEIDAAIQRSQQYEQAADAELAWVAETKRKLMALGPIRLEQDQTTAQLQVQKAFSIDIIRHKDSMDELFSHRGEIFSTCGEEQKAVLQEKTECLIQQYEAVSLLNSERYARLERAQVLVNQFWETYEELSPWAEETLALIAQLPPPAVDHEQLRQQQEEMRQLRESIAEHKPHIDKILKIGPQLKELNPEEGKMVEEKYQKAENMYAQIKDEVRQRALALDEAVSQSAQFHDKIEPMLETLENLSSRLRMPPLIPAEVDKIRECISDNKSATVELEKLQPSFEALKRRGEELIGRSQGADKDLAAKEIQDKLDQMVFFWEDIKARSEEREIKFLDVLELAEKFWYDMAALLTTIKDTQDIVHDLESPGIDPSIIKQQVEAAETIKEETDGLHEELEFIRILGADLIFACGETEKPEVKKSIDEMNNAWENLNKTWKERLEKLEDAMQAAVQYQDTLQAMFDWLDNTVIKLCTMPPVGTDLNTVKDQLNEMKEFKVEVYQQQIEMEKLNHQGELMLKKATDETDRDIIREPLTELKHLWENLGEKIAHRQHKLEGALLALGQFQHALEELMSWLTHTEELLDAQRPISGDPKVIEVELAKHHVLKNDVLAHQATVATVNKAGSELLESSAGDDASSLRSRLETMNQCWESVLQKTEEREQQLQSTLQQAQGFHSEIEDFLLELNRMENQLSASKPTGGLPETAREQLDTHMELHSQLRAKEEIYNQLLDKGRLMLLSRGDSGSGSKTEQSVALLEQKWHAVSSKVEERKSKLEEALSLATEFQNSLQEFINWLTLAEQSLNIASPPSLILNTVLSQIEEHKVFANEVNDHRDQIIELDQTGNQLKFLSQKQDVVLIKNLLVSVQSRWEKVVQRSIERGRSLDDARKRAKQFHEAWKKLIDWLEDAESHLDSELEISNDPDKIKLQLSKHKEFQKTLGGKQPVYDTTIRTGRALKEKTLLAGDTQKLDNLLGEVRDKWDTVCGKSVERQHKLEEALLFSGQFMDALQALVDWLYKVEPQLAEDQPVHGDLDLVMNLMDAHKVFQKELGKRTGTVQVLKRSGRELIEGSRDDTTWVKGQLQELSTRWDTVCKLSVSKQSRLEQALKQAEEFRDTVHMLLEWLSEAEQTLRFRGALPDDTEALQSLIDTHKEFMKKVEEKRVDVNTAVAMGEAILAVCHPDCITTIKHWITIIRARFEEVLTWAKQHQQRLETALSELVANAELLEELLAWIQWAETTLIQRDQEPIPQNIDRVKALITEHQSFMEEMTRKQPDVDRVTKTYKRKSVEPTHAPFMEKSRSGSRKSLNQPTPPPMPILSQSEAKNPRINQLSARWQQVWLLALERQRKLNDALDRLEELKEFANFDFDVWRKKYMRWMNHKKSRVMDFFRRIDKDQDGKITRQEFIDGILASKFPTTKLEMTAVADIFDRDGDGYIDYYEFVAALHPNKDAYRPTTDADKIEDEVTRQVAQCKCAKRFQVEQIGENKYRFGDSQQLRLVRILRSTVMVRVGGGWMALDEFLVKNDPCRARGRTNIELREKFILPEGASQGMTPFRSRGRRSKPSSRAASPTRSSSSASQSNHSCTSMPSSPATPASGTKVISSSGSKLKRPTPAFHSSRTSLAGDTSNSSSPASTGAKANRADPKKSASRPGSRAGSRAGSRASSRRGSDASDFDLLETQSACSDTSESSAAGGQGSSRRGLTKPSKIPTMSKKTTTASPRTPGPKR

SEQ ID NO: 731 - protein, 354 aa, Mus musculus
MLCSLFLLLLAVGRVQTTRPCFPGCQCEEETFGLFDSFSLIRVDCSSLGPHIVPVPIPLDTAHLDLSSNRLETVNESVLAGPGYTTLAGLDLSYNLLTSIMPSAFSRLRYLESLDLSHNGLAALPAEIFTSSPLSDINLSHNRLREVSISAFTTHSQGRALHVDLSHNLIHRLLPHPARASLPAPTIQSLNLSWNRFRAVPDLRDLPLRYLSLDGNPLATINPDAFMGLAGLTHLSLASLQGILHLPPHGFRELPGLQVLDLSGNPKLKWAGAEVFSGLGLLQELDLSGSSLVPLPEMLLHHLPALQSVSVGQDVQCRRLVREGAYHRQPGSSPKVVLHCGDTQESAARGPDIL

SEQ ID NO: 732 - protein, 284 aa, Mus musculus
MFDKTRLPYVALDVICVLLAAMPMTILKLGKVYPFQRGFFCTDNSVKYPYHDSTIPSRILAILGLGLPIFSMSIGESLSVYFNVLHSNSFVGNPYIATIYKAVGAFLFGVSASQSLTDIAKYTIGSLRPHFLAICNPDWSKINCSDGYIEDYICQGNEEKVKEGRLSFYSGHSSFSMYCMLFVALYLQARMKGDWARLLRPMLQFGLIAFSIYVGLSRVSDYKHHWSDVTVGLIQGAAMAILVALYVSDFFKDTHSYKERKEEDPHTTLHETASSRNYSTNHEP

SEQ ID NO: 733 - protein, 2460 aa, Mus musculus
MHVSLAEALEVRGGPLQEEEIWAVLNQSAESLQEVFRRVSIADPAALGFIISPWSLLLLPSGSVSFTDENVSNQDLRASTAPEVLQSHSLTSLADVEKIHIYSLGMTLYWGADHEVPQSQPIKLGDHLNSILLGMCEDVIYARVSVRTVLDACSAHIRNSNCAPSFSNVKQLVKLVLGNISGTDPLSRSSEQKPDRSQAIRDRLRGKGLPTGRSSTSDALDTHEAPLSQQTFVNKGLSKSMGFLSIRDTRDEEDYLKDTPSDNNSRHEDSETFSSPYQFKTSTPQMDALSKKKTWASSMDLLCAANRDISGETGRYQRCDPKTVTGRTSITPRKKEGRYSDGSIALDIFGPQKVEPVIHTRELPTSTAVSSALDRIRERQQKLQVLREAMNVEEPVRRYKTYHSDIFSISSESPSVISSESDFRQVRKSEASKRFESSSGLPGVDETGQTRPSRQYETSLEGNLINQDIMLRRQEEEMMQLQARMALRQSRLSLYPGDTVKASMLDISRDPLREMALETAMTQRKLRNFFGPEFVKMTVEPFVSLDLPRSILSQTKKGKSEDQRRKVNIRLLSGQRLELTCDTKTICKDVFDMVVAHIGLVEHHLFALATRKENEYFFVDPDLKLTKVAPEGWKEEPKRKGKAAVDFTLFFRIKFFMDDVSLIQHDLTCHQYYLQLRKDLLDERVHCDDEAALLLASLALQAEYGDYQPEVHGVSYFRLEHYLPARVMEKLDVSYIKEELPKLHNTYAGASEKETELEFLKVCQRLTEYGVHFHRVHPEKKSQTGILLGVCSKGVLVFEVHNGVRALVLRFPWRETKKISFSKKKITLQNTSDGIKHAFQTDSSKACQYLLHLCSSQHKFQLQMRARQSNQDAQDIERASFRSLNLQAESVRGFNMGRAISTGSLASSTINKLAVRPLSVQAEILKRLSSSEWSLYQPLQNSSKEKTDKASWEEKPRGMSKSYHDLSQASLCPHRKQVINMEALPQAFAELVGKPLYPMARSDTESLAGLPKLDNSKSVASLNRSPERRNHESDSSTEDPGQAYVVGMSLPSSGKSSSQVPFKDNDTLHKRWSIVSSPEREITLVNLKKDPKHGLGFQIIGGEKMGRLDLGVFISAVTPGGPADLDGCLKPGDRLISVNSVSLEGVSHHAAVDILQNAPEDVTLVISQPKEKPSKVPSTPVHFANGMKSYTKKPAYMQDSAMDPSEDQPWPRGTLRHIPESPFGLSGGLREGSLSSQDSRTESASLSQSQVNGFFASHLGDRGWQEPQHSSPSPSVTTKVNEKTFSDSNRSKAKRRGISDLIEHLDCADSDKDDSTYTSSQDHQTSKQEPSSSLSTSNKTSFPTSSASPPKPGDTFEVELAKTDGSLGISVTGGVNTSVRHGGIYVKAIIPKGAAESDGRIHKGDRVLAVNGVSLEGATHKQAVETLRNTGQVVHLLLEKGQVPTSRERDPAGPQSPPPDQDAQRQAPEKVAKKHPMSKTTALLLKIIFEVKLFKNSSGLGFSFSREDNLIPEQINGSIVRVKKLFPGQPAAESGKIDVGDVILKVNGAPLKGLSQQDVISALRGTAPEVSLLLCRPAPGVLPEIDTTFLNPLYSPANSFLNSSKETSQPSSSVEQGASSDDNGVSGKTKNHCRAPSRRESYSDHSESGEDDSVRAPAKMPNVTRVAAFPHEAPRSQEESICAMFYLPRKIPGKLESESSHPPPLDVSPGQTCQPPAECAPSDATGKHFTHLASQLSKEENITTLKNDLGNHLEDSELEVELLITLVKSEKGSLGFTVTKGSQSIGCYVHDVIQDPAKGDGRLKAGDRLIKVNDTDVTNMTHTDAVNLLRAAPKTVRLVLGRILELPRMPVFPHLLPDITVTCHGEELGFPLSGGQGSPHGVVYISDINPRSAAAVDGSLQLLDIIHYVNGVSTQGMTLEDANRALDLSLPSVVLKVTRDGCPVVPTTRAAISAPRFTKANGLTSMEPSGQPALMPKNSFSKVNGEGVHEAVCPAGEGSSSQMKESAGLTETKESNSRDDDIYDDPQEAEVIQSLLDVVDEEAQNLLNQRHATRRACSPDPLRTNGEAPEEGDTDYDGSPLPEDVPESVSSGEGKVDLASLTAASQEEKPIEEDATQESRNSTTETTDGEDSSKDPPFLTNEELAALPVVRVPPSGKYTGTQLQATIRTLQGLLDQGIPSKELENLQELKPLDQCLIGQTKENRRKNRYKNILPYDTTRVPLGDEGGYINASFIRIPVGTQEFVYIACQGPLPTTVGDFWQMVWEQNSTVIAMMTQEVEGEKIKCQRYWPSILGTTTMANERLRLALLRMQQLKGFIVRVMALEDIQTGEVRHISHLNFTAWPDHDTPSQPDDLLTFISYMRHIRRSGPVITHCSAGIGRSGTLICIDVVLGLISQDLEFDISDLVRCMRLQRHGMVQTEGQYVFCYQVILYVLTHLQAEEQKAQQGSHSDAEQPPKAPP

SEQ ID NO: 734 - protein, 101 aa, Mus musculus
MARPLEEALDVIVSTFHKYSGKEGDKFKLNKTELKELLTRELPSFLGKRTDEAAFQKVMSNLDSNRDNEVDFQEYCVFLSCIAMMCNEFFEGCPDKEPRKK

SEQ ID NO: 735 - protein, 345 aa, Mus musculus
MAMAVAQKFNHLLSSLWHVGQKPPQPEPVFTVDRAQVPPLFWKPYIYAGYRPLHQNWCFYFRTLFQRHNEAVNVWTHLLAALALLLRLIGLAASVDFREDPHALPLFFIVLASFTYLSFSAVAHLLQAKSEFWHYSFFFLDYVGVAVYQFGSALAHFYYAIEPSWHDKVQAIFLPTAAFLAWLSCAGSCYNKYSQKPGLLGRIFQEAPSALAYVLDISPVLHRIIVSPLPAEEDPALLYHKCQVVFFLLAAAFFSTVMPESWFPGSCHIFGQGHQVFHVFLVLCTLAQLEAVTLDYQARRGIYEPLHARWPHNFSGLFLLTVASSSLTALLLSQLVRRKLHQKTK

SEQ ID NO: 736 - protein, 358 aa, Mus musculus
MAPQNLSTFCLLLLYLIGTVIAGRDFYKILGVPRSASIKDIKKAYRKLALQLHPDRNPDDPQAQEKFQDLGAAYEVLSDSEKRKQYDAYGEEGLKDGHQSSHGDIFSHFFGDFGFMFGGTPRQQDRNIPRGSDIIVDLEVTLEEVYAGNFVEVVRNKPVARQAPGKRKCNCRQEMRTTQLGPGRFQMTQEVVCDECPNVKLVNEERTLEVEIEPGVRDGMEYPFIGEGEPHVDGEPGDLRFRIKVVKHRIFERRGDDLYTNVTVSLVEALVGFEMDITHLDGHKVHISRDKITRPGAKLWKKGEGLPNFDNNNIKGSLIITFDVDFPKEQLTEEAKEGIKQLLKQGPVQKVYNGLQGY

SEQ ID NO: 737 - protein, 1086 aa, Mus musculus
MAHLLKTVVAGCSCPFLSNLGSSKVLPGKRDFVRMLRTHQALWCKSPVKPGIPYKQLTVGVPKEIFQNEKRVALSPAGVQALVKQGFNVVVESGAGEASKFPDDLYRAAGAQIQGMKEVLASDLVVKVRAPMVNPTLGAHEADFLKPSGTLISFIYPAQNPDLLNKLSERKTTVLAMDQVPRVTIAQGYDALSSMANISGYKAVVLAANHFGRFFTGQITAAGKVPPAKILIVGGGVAGLASAGAAKSMGAVVRGFDTRAAALEQFKSLGAEPLEVDLKESGEGQGGYAKEMSKEFIEAEMKLFAQQCKEVDILISTALIPGKKAPVLFSKEMIESMKEGSVVVDLAAEAGGNFETTKPGELYVHKGITHIGYTDLPSRMATQASTLYSNNITKLLKAISPDKDNFHFEVKDDFDFGTMSHVIRGTVVMKDGKVIFPAPTPKNIPEEAPVKPKTVAELEAEKAGTVSMYTKTLTTASVYSAGLTGMLGLGIVAPNVAFSQMVTTFGLAGIIGYHTVWGVTPALHSPLMSVTNAISGLTAVGGLALMGGHFYPSTTSQSLAALATFISSVNIAGGFLVTQRMLDMFKRPTDPPEYNYLYLLPGGTFVGGYLAALYGGYNIEEIMYLGSGLCCVGALGGLSTQGTARLGNALGMIGVAGGLAATLGGLKPDPQLLAQMSGAMAMGGTIGLTIAKRIQISDLPQLVAAFHSLVGLAAVLTCMAEYIVEYPHFAMDATSNFTKIVAYLGTYIGGVTFSGSLVAYGKLQGILKSAPLLLPGRHALNAGLLAASVGGIIPFMADPSFTTGITCLGSVSALSTLMGVTLTAAIGGADMPVVITVLNSYSGWALCAEGFLLNNNLLTIVGALIGSSGAILSYIMCVAMNRSLANVILGGYGTTSTAGGKPMEISGTHTEINLDNAVEMIREANSIVITPGYGLCAAKAQYPIADLVKMLTEQGKKVRFGIHPVAGRMPGQLNVLLAEAGVPYDIVLEMDEINSDFPDTDLVLVIGANDTVNSAAQEDPNSIIAGMPVLEVWKSKQVIVMKRSLGVGYAAVDNPIFYKPNTAMLLGDAKKTCDALQAKVRESYQK

SEQ ID NO: 738 - protein, 526 aa, Mus musculus
MSQDTEVDMKDVELNELEPEKQPMNAAAGAAAGEKNGLVKIKVAEDETEAGVKFTGLSKEELLKVAGSPGWVRTRWALLLLFWLGWLGMLAGAVVIIVRAPRCRELPVQRWWHKGALYRIGDLQAFVGPDAGGIAGLKSHLEYLSTLKVKGLVLGPIHKNQKDEINETDLKQINPTLGSQEDFKDLLQSAKKKSIHIILDLTPNYQGQNAWFLPAQADIVATKMKEALSSWLQDGVDGFQFRDVGKLMNAPLYLAEWQNITKNLSEDRLLIAGTESSDLQQIVNILESTSDLLLTSSYLSNSTFTGERTESLVTRFLNATGSQWCSWSVSQAGLLADFIPDHLLRLYQLLLFTLPGTPVFSYGDELGLQGALPGQPAKAPLMPWNESSIFHIPRPVSLNMTVKGQNEDPGSLLTQFRRLSDLRGKERSLLHGDFHALSSSPDLFSYIRHWDQNERYLVVLNFRDSGRSARLGASNLPAGISLPASAKLLLSTDSARQSREEDTSLKLENLSLNPYEGLLLQFPFVA

SEQ ID NO: 739 - protein, 421 aa, Mus musculus
MASFPPRVNEKEIVRSRTIGELLAPAAPFDKKCGGENWTVAFAPDGSYFAWSQGYRIVKLVPWSQCRKNFLLHGSKNVTNSSCLKLARQNSNGGQKNKPPEHVIDCGDIVWSLAFGSSVPEKQSRCVNIEWHRFRFGQDQLLLATGLNNGRIKIWDVYTGKLLLNLVDHIEMVRDLTFAPDGSLLLVSASRDKTLRVWDLKDDGNMVKVLRAHQNWVYSCAFSPDCSMLCSVGASKAVFLWNMDKYTMIRKLEGHHHDVVACDFSPDGALLATASYDTRVYAWDPHNGDLLMEFGHLFPSPTPIFAGGANDRWVRAVSFSHDGLHVASLADDKMVRFWRIDEDCPVQVAPLSNGLCCAFSTDGSVLAAGTHDGSVYFWATPRRVPSLQHICRMSIRRVMSTQEVQKLPVPSKILAFLSYRG

SEQ ID NO: 740 - protein, 722 aa, Mus musculus
MAQWNQLQQLDTRYLEQLHQLYSDSFPMELRQFLAPWIESQDWAYAASKESHATLVFHNLLGEIDQQYSRFLQESNVLYQHNLRRIKQFLQSRYLEKPMEIARIVARCLWEESRLLQTAATAAQQGGQANHPTAAVVTEKQQMLEQHLQDVRKRVQDLEQKMKVVENLQDDFDFNYKTLKSQGDMQDLNGNNQSVTRQKMQQLEQMLTALDQMRRSIVSELAGLLSAMEYVQKTLTDEELADWKRRQQIACIGGPPNICLDRLENWITSLAESQLQTRQQIKKLEELQQKVSYKGDPIVQHRPMLEERIVELFRNLMKSAFVVERQPCMPMHPDRPLVIKTGVQFTTKVRLLVKFPELNYQLKIKVCIDKDSGDVAALRGSRKFNILGTNTKVMNMEESNNGSLSAEFKHLTLREQRCGNGGRANCDASLIVTEELHLITFETEVYHQGLKIDLETHSLPVVVISNICQMPNAWASILWYNMLTNNPKNVNFFTKPPIGTWDQVAEVLSWQFSSTTKRGLSIEQLTTLAEKLLGPGVNYSGCQITWAKFCKENMAGKGFSFWVWLDNIIDLVKKYILALWNEGYIMGFISKERERAILSTKPPGTFLLRFSESSKEGGVTFTWVEKDISGKTQIQSVEPYTKQQLNNMSFAEIIMGYKIMDATNILVSPLVYLYPDIPKEEAFGKYCRPESQEHPEADPGSAAPYLKTKFICVTPFIDAVWK

SEQ ID NO: 741 - protein, 368 aa, Mus musculus
MAPCTLLLLLAAALAPTQTRAGPHSLRYFVTAVSRPGLGEPRFIAVGYVDDTQFVRFDSDADNPRFEPRAPWMEQEGPEYWEEQTQRAKSDEQWFRVSLRTAQRYYNQSKGGSHTFQRMFGCDVGSDWRLLRGYQQFAYDGRDYIALNEDLKTWTAADTAALITRRKWEQAGDAEYYRAYLEGECVEWLRRYLELGNETLLRTDSPKAHVTYHPRSQVDVTLRCWALGFYPADITLTWQLNGEDLTEDMELVETRPAGDGTFQKWAAVVVPLGKEQNYTCHVHHKGLPEPLTLRWKLPPSTVSNTVIIAVLVVLGAAIVTGAVVAFVMKMRRNTGGKGVNYALAPGSQTSDLSLPDGKVMVHDPHSLA

SEQ ID NO: 742 - protein, 132 aa, Mus musculus
MSLQLRSSAHIPSGSSSPFMRMAPLAFLLLFTLPQHLAEAAPSSVIAATELRCVCLTVTPKINPKLIANLEVIPAGPQCPTVEVIAKLKNQKEVCLDPEAPVIKKIIQKILGSDKKKAKRNALAVERTASVQ

SEQ ID NO: 743 - protein, 363 aa, Mus musculus
MQLEIQVALNFIISYLYNKLPRRRVNIFGEELERLLKKKYEGHWYPEKPYKGSGFRCIHVGEKVDPVIEQASKESGLDIDDVRGNLPQDLSVWIDPFEVSYQIGEKGPVKVLYVDDSSETGCELDKEIKNSFNPEPQVFMPISDPASSVSSSPSPPFGHSAAVSPTFMPRSTQPLTFTTATFAATKFGSTKMKNSGRSSKVARTSPINLGLTVNVNHLLKQKAISSSVHSLYGLGLGSQQQPQPQPQQQQQQQPSSSQPPPPLPQQQQQQPQQQQQQQQQQTSALSPNAKEFIFPNMQGQGSSTNGMFPGDSPLNLSPLQYSNAFDVFAAYGGLNEKSFVDGLNFSLNNMQYSNQQFQPVMAN

SEQ ID NO: 744 - protein, 363 aa, Mus musculus
MALGRLLLLLAAALTLTKTGAGSHSLRYFETSVSRPGFGKPRFISVGYVDDTQFVRFDSDAKNPRYEPRAPWMEQEGPEYWERNTRRVKGSEKRFQESLSTLLSYYNQSKGGIHTFQKLSGCDLGSDGRLQSGYLQFAYDGLDYIALNEDLETWTAADVAAQETRHKWEQAGAAEKHRTYLEGKCLMWLHRYLELGKEMLLRTDPPKAHVTHHPRSQGDVTLRCWALGFYPADITLTWQLNGEELTQDMELVETRPAGDGTFQKWASVVVPLGKEQNYTCHVYHEGLPEPLTLRWEPPPYTVSNMVIIAVLVVLGAVIVIGAVVIIGVMVSFVMKRRRNKGGQGEDCALAPSRAAPRALISLS

SEQ ID NO: 745 - protein, 673 aa, Mus musculus
MPPPPGPAAALGTALLLLLLASESSHTVLLRAREAAQFLRPRQRRAYQVFEEAKQGHLERECVEEVCSKEEAREVFENDPETEYFYPRYQECMRKYGRPEEKNPDFAKCVQNLPDQCTPNPCDKKGTHICQDLMGNFFCVCTDGWGGRLCDKDVNECVQKNGGCSQVCHNKPGSFQCACHSGFSLASDGQTCQDIDECTDSDTCGDARCKNLPGSYSCLCDEGYTYSSKEKTCQDVDECQQDRCEQTCVNSPGSYTCHCDGRGGLKLSPDMDTCEDILPCVPFSMAKSVKSLYLGRMFSGTPVIRLRFKRLQPTRLLAEFDFRTFDPEGVLFFAGGRSDSTWIVLGLRAGRLELQLRYNGVGRITSSGPTINHGMWQTISVEELERNLVIKVNKDAVMKIAVAGELFQLERGLYHLNLTVGGIPFKESELVQPINPRLDGCMRSWNWLNGEDSAIQETVKANTKMQCFSVTERGSFFPGNGFATYRLNYTRTSLDVGTETTWEVKVVARIRPATDTGVLLALVGDDDVVISVALVDYHSTKKLKKQLVVLAVEDVALALMEIKVCDSQEHTVTVSLREGEATLEVDGTKGQSEVSTAQLQERLDTLKTHLQGSVHTYVGGLPEVSVISAPVTAFYRGCMTLEVNGKILDLDTASYKHSDITSHSCPPVEHATP

SEQ ID NO: 746 - protein, 748 aa, Mus musculus
MSFIDPYQHIIVEHQYSHKFTVVVLRATKVTKGTFGDMLDTPDPYVELFISTTPDSRKRTRHFNNDINPVWNETFEFILDPNQENVLEITLMDANYVMDETLGTATFPVSSMKVGEKKEVPFIFNQVTEMILEMSLEVCSCPDLRFSMALCDQEKTFRQQRKENIKENMKKLLGPKKSEGLYSTRDVPVVAILGSGGGFRAMVGFSGVMKALYESGILDCATYIAGLSGSTWYMSTLYSHPDFPEKGPEEINEELMKNVSHNPLLLLTPQKVKRYVESLWKKKSSGQPVTFTDIFGMLIGETLIQNRMSMTLSSLKEKVNAARCPLPLFTCLHVKPDVSELMFADWVEFSPYEIGMAKYGTFMAPDLFGSKFFMGTVVKKYEENPLHFLMGVWGSAFSILFNRVLGVSGSQNKGSTMEEELENITAKHIVSNDSSDSDDEAQGPKGTENEEAEKEYQSDNQASWVHRMLMALVSDSALFNTREGRAGKVHNFMLGLNLNTSYPLSPLRDFSSQDSFDDELDAAVADPDEFERIYEPLDVKSKKIHVVDSGLTFNLPYPLILRPQRGVDLIISFDFSARPSDTSPPFKELLLAEKWAKMNKLPFPKIDPYVFDREGLKECYVFKPKNPDVEKDCPTIIHFVLANINFRKYKAPGVLRETKEEKEIADFDIFDDPESPFSTFNFQYPNQAFKRLHDLMYFNTLNNIDVIKDAIVESIEYRRQNPSRCSVSLSNVEARKFFNKEFLSKPTV

SEQ ID NO: 747 - protein, 202 aa, Mus musculus
MEAGLLWFCNWSTLGVCAALKLPQIYAQLAARSARGISLPSLLLELAGFLVFLRYQHYYGNPLLTYLEYPILIAQDIVLLLFVFHFNGNVKQALPYMAVFVSSWFILSLQKWIIDLAMNLCTVISAASKFAQLQYLWKVQDSGAVSALTWGLSAYTCATRIITTLMTTNDLTILIRFVIMLALNIWVTATVLHYRKSVTKAE

SEQ ID NO: 748 - protein, 400 aa, Mus musculus
MAANYSSTSSRKEHVKVTSEPQPGFLERLSETSGGMFVGLMTFLLSFYLIFTNEGRALKTATSLAEGLSLVVSPDSIHSVAPENEGRLVHIIGALRTSKLLSDPNYGVHLPAVKLRRHVEMYQWVETEESSEYTEDGQVKKETKYSYNTEWRSEIVNSRNFDREIGHKNPSAMAVESFTATAPFVQIGRFFLSAGLIDKIDNFKALSLAKLEDPHVDIIRRGDFFYHSENPKYPEVGDVRVSFSYAGLSSDDPDLGPAHVVTVIARQRGDQLIPYSTKSGDTLLLLHHGDFSAEEVFRREQKSNSMKTWGLRAAGWMAMFMGLNLMTRILYTLVDWFPVFRDLVNIGLKAFAFCVATSLTLLTVAAGWLFYRPLWAALIGCLALVPIIIARTRVPAKKLE

SEQ ID NO: 749 - protein, 1745 aa, Mus musculus
MSARAAAAKSTAMEETAIWEQHTVTLHRAPGFGFGIAISGGRDNPHFQSGETSIVISDVLKGGPAEGQLQENDRVAMVNGVSMDNVEHAFAVQQLRKSGKNAKITIRRKKKVQIPVSHPDPEPVSDNEDDSYDEEVHDPRAGRGALANRRSEKSWARDRSASRERSLSPRSDRRSVASSQPAKPTKVTLVKSRKNEEYGLRPASHIFVKEISQDSLAARDGDIQEGDVVLKINGTVTENMSLTDAKTLIERSKGKLKMVVQRDERATLLNVPDLSDSIHSANASERDDISEIQSLASDHSGRSHDRPPRRSQSRSPDQRSEPSDHSTQSPQQPSNGSLRSREEERMSKPGAISTPVKHVDDHPPKAVEEVTVEKNEKQTPTLPEPKPVYAQVGQPDVDLPVSPSDGALPNSAHEDGILRPSMKLVKFRKGDSVGLRLAGGNDVGIFVAGVLEDSPAAKEGLEEGDQILRVNNVDFTNIIREEAVLFLLDLPKGEEVTILAQKKKDVYRRIVESDVGDSFYIRTHFEYEKESPYGLSFNKGEVFRVVDTLYNGKLGSWLAIRIGKNHKEVERGIIPNKNRAEQLASVQYTLPKTAGGDRADFWRFRGLRSSKRNLRKSREDLSAQPVQTKFPAYERVVLREAGFLRPVTIFGPIADVAREKLAREEPDIYQIAKSELRDAGTDHRSSGIIRLHTIKQIIDQDKHALLDVTPNAVDRLNYAQWYPIVVFLNPDSKQGVKTMRMRLCPESRKSARKLYERSHKLRKNNHHLFTTTINLNSMNDGWYGALKEAIQQQQNQLVWVSEGKADGATSDDLDLHDDRLSYLSAPGSEYSMYSTDSRHTSDYEDTDTEGGAYTDQELDETLNDEVGTPPESAITRSSEPVREDSSGMHHENQTYPPYSPQAQPQAIHRIDSPGLKPASQQKAEASSPVPYLSPETTPASSASAVNHNVSVTNVSLEEPAPAPPTSHASQPGCLGAPSAEAAHVGLRGEGPPLPPHADPAKVYRKEPYSEEMMRQNHILKQPALGHPGQRPDKEPNLAYEPQLPYIEKQASRDLEQPSYRYEVSSYTDQFSRNYDHRLRFEDRIPTYEDQWSYYDDKQPYQPRPFENQHPRDLDSRQHPEEASERGYFQRFEEPAPLSYDSRTRYEQLPRTSTLRHEEQPAPAYEVHNRYRPEAQPYSSTGPKSSEPKQYFDQYPRSYEQVPPPGFTSKTGHYEPLHGAAVVPPLIPSSQQKPEVLRSATKPQPPPPTLTEEEEDPAMKPQSVLTRVKMFENKRSASLENKKDVNDTASFKPPEVASKPPGASLAGPKPVPQSQFSEHDKTLYRLPEPQKPQVKPPEDIVRSNHYDPEEDEEYYRKQLSYFDRRSFESKPSAHLPAGHHSEPAKPVHSQSQPNFPSYSSKGKPETDAVDRSFSEKRYDPAQATPPPPPLPSQYSQPAPPLSSSSLHIHSKGAQGEGNSVSLDFQNSYMSKPDPPPSQSKPATFRPPTREDPPQTFYPQKSFPDKAPVNGAEQTQKTITPVYNRFTPKPYTSSARPFERKFESPKFNHNLLPSETVHKPELSSKTPTSPKTLMKAHSSTQPPEFGSGVETFSVHTDKPKYQMNNISTMPKAVPVSPSAVEEDEDEDGHTVVATARGIFNSNGGVLSSIETGVSIIIPQGAIPEGIEQEIYFKVCRDNSILPPLDKEKGETLLSPLVMCGPHGLKFLKPVELRLPHCDPKTWQNKCLPGDPNYLVGANCVSVLIDHF

SEQ ID NO: 750 - protein, 1176 aa, Mus musculus
MPLPFGLKLKRTRRYTVSSKSCLVARIQLLNNEFVEFTLSVESTGQESLEAVAQRLELREVTYFSLWYYNKQNQRRWVDLEKPLKKQLDKHALEPTVYFGVLFYVPSVSQLQQEITRYQYYLQLKKDILEGNLPCTLEHAIQLAGLAVQADFGDFDQYESQDFLQKFALLPVAWLQDEKVLEEAAQKVALLHQKYRGLTAPEAELLYMQEVERMDGYGEESYPAKDSQGSDISIGACLDGIFVKHKNGRPPVVFRWHDIANMSHNKSFFALELANKEETIQFQTEDMETAKYVWRLCVARHKFYRLNQCSLQTQAATLNSVRRDSSSRMSLPKPQPYAMPPPPQLHYNGHYTEPFASSQDNIFVPNKNGFYCHSQTSLDRTQIDLSGRIRNGSVYSAHSTNSLNTLQPYLQPSPMSSNPSITGSDVMRPDSLPSHRHSALIPPSYRPTPDYETVMKQLNRGMVHADRHSHSLRNLNIGSSYAYSRPDALVYSQPEIREHPHLTSPQSAHYPFNLNYSFHSQSPYPYPAERRPVVGAVSVPELTNVQLQAQDYPAPNIMRTQVYRPPPPYPYPRPANSTPDLSRHLYISSSNPDLITRRVHHSVQTFQEDSLPVAHSLQEVSEPLTAARHAHLQKRNSIEIAGLTHGFEGLRLKERTVSASAADVAPRTFSAGSQSSVFSDKMKQEGTEEQEGGRYSHKKSLSDATMLIDSSEEDEDLEEDSSREQAISAVSEPRLTAAFSQELNYPCASATPITGPLHIFEPKPHVTEPEKRAKDISPVHLVVETHRPRRDGLLTPSMSESDLTTSGRYRARRDSVKKRPVSDLLSGKKSAVEGLPPLGGMKKTRADAKKIGPLKLAALNGLSLSRLPLPDEGKEVSTRATNDERCKVLEQRLEQGMVFTEYERILKKRLVDGECSTARLPENAERNRFQDVLPYDDARVELVPTKENNTGYINASHIKVSVSGIEWDYIATQGPLQNTCQDFWQMVWEQGVAIIAMVTAEEEGGREKSFRYWPRLGSRHNTVTYGRFKITTRFRTDSGCYATTGLKMKHLLTGQERTVWHLQYTDWPEHGCPEDLKGFLSYLEEIQSVRRHTNSTSEPKSHNPPLLVHCSAGVGRTGVVILSEIMVACLEHNEVLDIPRVLDMLRQQRMMLVQTLGQYTFVYRVLIQFLKSSRLI

SEQ ID NO: 751 - protein, 135 aa, Mus musculus
MACGLVASNLNLKPGECLKVRGEVASDAKSFVLNLGKDSNNLCLHFNPRFNAHGDANTIVCNTKEDGTWGTEHREPAFPFQPGSITEVCITFDQADLTIKLPDGHEFKFPNRLNMEAINYMAADGDFKIKCVAFE

SEQ ID NO: 752 - protein, 543 aa, Mus musculus
MATSLSADSPQQLSSLSTQQTTLLLLFSVLAAVHLGQWLLRQWQRKPWSSPPGPFPWPLIGNAAAVGQASHLYFARLARRYGDVFQIRLGSCPVVVLNGESAIHQALVQQGSIFADRPPFASFRVVSGGRSLAFGHYSEHWKTQRRSAYSTMRAFSTRHPRSRGLLEGHALAEARELVAVLVRRCAGGAFLDPTQPVIVAVANVMSAVCFGCRYNHDDAEFLELLSHNEEFGRTVGAGSLVDVLPWLQLFPNPVRTTFRKFEQLNRNFSNFVLDKFLRHRESLVPGAAPRDMTDAFILSAEKKASGAPGDDSSGLDLEDVPATITDIFGASQDTLSTALLWLLILFTRYPDVQARVQAELDQVVGRDRLPCMSDQPNLPYVMAFLYESMRFSSFLPVTIPHATTANTFVLGYYIPKNTVVFVNQWSVNHDPAKWPNPEDFDPARFLDKDGFINKALASSVMIFSVGKRRCIGEELSKMLLFLFISILAHQCNFKANQNESSNMSFSYGLTIKPKSFRIHVSLRESMELLDNAVKKLQTEEGCK

SEQ ID NO: 753 - protein, 163 aa, Mus musculus
MPTIKLQSSDGEIFEVDVEIAKQSVTIKTMLEDLGMDDEGNDDPVPLPNVNAAILKKVIQWCTHHKDDPPPPEDDENKEKRTDDIPVWDQEFLKVDQGTLFELILAANYLDIKGLLDVTCKTVANMIKGKTPEEIRKTFNIKNDFTEEEEAQVRKENQWCEEK

SEQ ID NO: 754 - protein, 355 aa, Mus musculus
MGCTVSAEDKAAAERSKMIDKNLREDGEKAAREVKLLLLGAGESGKSTIVKQMKIIHEDGYSEEECRQYRAVVYSNTIQSIMAIVKAMGNLQIDFADPQRADDARQLFALSCAAEEQGMLPEDLSGVIRRLWADHGVQACFGRSREYQLNDSAAYYLNDLERIAQSDYIPTQQDVLRTRVKTTGIVETHFTFKDLHFKMFDVGGQRSERKKWIHCFEGVTAIIFCVALSAYDLVLAEDEEMNRMHESMKLFDSICNNKWFTDTSIILFLNKKDLFEEKITQSSLTICFPEYTGANKYDEAASYIQSKFEDLNKRKDTKEIYTHFTCATDTKNVQFVFDAVTDVIIKNNLKDCGLF

SEQ ID NO: 755 - protein, 633 aa, Mus musculus
MSARGPAIGIDLGTTYSCVGVFQHGKVEIIANDQGNRTTPSYVAFTDTERLIGDAAKNQVAMNPTNTIFDAKRLIGRKFEDATVQSDMKHWPFRVVSEGGKPKVQVEYKGEMKTFFPEEISSMVLTKMKEIAEAYLGGKVQSAVITVPAYFNDSQRQATKDAGTITGLNVLRIINEPTAAAIAYGLDKKGCAGGEKNVLIFDLGGGTFDVSILTIEDGIFEVKSTAGDTHLGGEDFDNRMVSHLAEEFKRKHKKDIGPNKRAVRRLRTACERAKRTLSSSTQASIEIDSLYEGVDFYTSITRARFEELNADLFRGTLEPVEKALRDAKLDKGQIQEIVLVGGSTRIPKIQKLLQDFFNGKELNKSINPDEAVAYGAAVQAAILIGDKSENVQDLLLLDVTPLSLGIETAGGVMTPLIKRNTTIPTKQTQTFTTYSDNQSSVLVQVYEGERAMTKDNNLLGKFDLTGIPPAPRGVPQIEVTFDIDANGILNVTAADKSTGKENKITITNDKGRLSKDDIDRMVQEAERYKSEDEANRDRVAAKNAVESYTYNIKQTVEDEKLRGKISEQDKNKILDKCQEVINWLDRNQMAEKDEYEHKQKELERVCNPIISKLYQGGPGGGGSSGGPTIEEVD

SEQ ID NO: 756 - protein, 325 aa, Mus musculus
MASSSGSKAEFIVGGKYKLVRKIGSGSFGDIYLAINITNGEEVAVKLESQKARHPQLLYESKLYKILQGGVGIPHIRWYGQEKDYNVLVMDLLGPSLEDLFNFCSRRFTMKTVLMLADQMISRIEYVHTKNFIHRDIKPDNFLMGIGRHCNKLFLIDFGLAKKYRDNRTRQHIPYREDKNLTGTARYASINAHLGIEQSRRDDMESLGYVLMYFNRTSLPWQGLKAATKKQKYEKISEKKMSTPVEVLCKGFPAEFAMYLNYCRGLRFEEAPDYMYLRQLFRILFRTLNHQYDYTFDWTMLKQKAAQQAASSSGQGQQAQTPTGF

SEQ ID NO: 757 - protein, 259 aa, Mus musculus
MAASALGRMCGAAREKLSPGPGARGLGALARSLVLALLLVPVLCSDRSENPPNNATVSSPVVVTAPGNHTSPSVSQISTTLSPASAEKSGSSSAAPTPTAAPSAPEEEADSNEDPSMEEEDLLALNSSPATGKDTLDNGDYGEPDYDWTTNPRDEEPEDINIAISKESRRFRGFQDSVEVVKLPPPNREDSHFFFHLLIFAFCAAVVYVTYHNKRKIFLLVQSRKWRDGLCSKTVEYHRLDQNVNEAMPSLKITNDYIF

SEQ ID NO: 758 - protein, 911 aa, Homo sapiens
MAQLFLPLLAALVLAQAPAALADVLEGDSSEDRAFRVRIAGDAPLQGVLGGALTIPCHVHYLRPPPSRRAVLGSPRVKWTFLSRGREAEVLVARGVRVKVNEAYRFRVALPAYPASLTDVSLALSELRPNDSGIYRCEVQHGIDDSSDAVEVKVKGVVFLYREGSARYAFSFSGAQEACARIGAHIATPEQLYAAYLGGYEQCDAGWLSDQTVRYPIQTPREACYGDMDGFPGVRNYGVVDPDDLYDVYCYAEDLNGELFLGDPPEKLTLEEARAYCQERGAEIATTGQLYAAWDGGLDHCSPGWLADGSVRYPIVTPSQRCGGGLPGVKTLFLFPNQTGFPNKHSRFNVYCFRDSAQPSAIPEASNPASNPASDGLEAIVTVTETLEELQLPQEATESESRGAIYSIPIMEDGGGGSSTPEDPAEAPRTLLEFETQSMVPPTGFSEEEGKALEEEEKYEDEEEKEEEEEEEEVEDEALWAWPSELSSPGPEASLPTEPAAQEESLSQAPARAVLQPGASPLPDGESEASRPPRVHGPPTETLPTPRERNLASPSPSTLVEAREVGEATGGPELSGVPRGESEETGSSEGAPSLLPATRAPEGTRELEAPSEDNSGRTAPAGTSVQAQPVLPTDSASRGGVAVVPASGDCVPSPCHNGGTCLEEEEGVRCLCLPGYGGDLCDVGLRFCNPGWDAFQGACYKHFSTRRSWEEAETQCRMYGAHLASISTPEEQDFINNRYREYQWIGLNDRTIEGDFLWSDGVPLLYENWNPGQPDSYFLSGENCVVMVWHDQGQWSDVPCNYHLSYTCKMGLVSCGPPPELPLAQVFGRPRLRYEVDTVLRYRCREGLAQRNLPLIRCQENGRWEAPQISCVPRRPARALHPEEDPEGRQGRLLGRWKALLIPPSSPMPGP

SEQ ID NO: 759 - protein, 363 aa, Mus musculus
MPHSYPALSAEQKKELSDIALRIVTPGKGILAADESVGSMAKRLSQIGVENTEENRRLYRQVLFSADDRVKKCIGGVIFFHETLYQKDDNGVPFVRTIQDKGILVGIKVDKGVVPLAGTDGETTTQGLDGLLERCAQYKKDGADFAKWRCVLKISDRTPSALAILENANVLARYASICQQNGIVPIVEPEILPDGDHDLKRCQYVTEKVLAAVYKALSDHHVYLEGTLLKPNMVTPGHACPIKYSPEEIAMATVTALRRTVPPAVPGVTFLSGGQSEEEASLNLNAINRCPLPRPWALTFSYGRALQASALNAWRGQRDNAGAATEEFIKRAEMNGLAAQGRYEGSGDGGAAAQSLYIANHAY

SEQ ID NO: 760 - protein, 193 aa, Mus musculus
MPNWGGGKKCGVCQKTVYFAEEVQCEGNSFHKSCFLCMVCKKNLDSTTVAVHGEEIYCKSCYGKKYGPKGYGYGQGAGTLSTDKGESLGIKHEEAPGHRPTTNPNASKFAQKIGGSERCPRCSQAVYAAEKVIGAGKSWHKSCFRCAKCGKGLESTTLADKDGEIYCKGCYAKNFGPKGFGFGQGAGALVHSE

SEQ ID NO: 761 - protein, 193 aa, Mus musculus; identical to SEQ ID NO: 760

SEQ ID NO: 762 - protein, 140 aa, Mus musculus
MASPLRSLLFLLAVLAVAWAATPKQGPRMLGAPEEADANEEGVRRALDFAVSEYNKGSNDAYHSRAIQVVRARKQLVAGVNYFLDVEMGRTTCTKSQTNLTDCPFHDQPHLMRKALCSFQIYSVPWKGTHSLTKFSCKNA

SEQ ID NO: 763 - protein, 650 aa, Mus musculus
MKAVLLLLCALGTAVAIPTSTRFLFDHSNPTTATLVTPEDATVPIAGVEATADIENHPNDKAEKPSALNSEEETHEQSTEQDKTYSFEVDLKDEEDGDGDLSVDPTEGTLTLDLQEGTSEPQQKSLPENGDFPATVSTSYVDPNQRANITKGKESQEQPVSDSHQQPNESSKQTQDLKAEESQTQDPDIPNEEEEEEEDEEEEEEEEPEDIGAPSDNQEEGKEPLEEQPTSKWEGNREQSDDTLEESSQPTQISKTEKHQSEQGNQGQESDSEAEGEDKAAGSKEHIPHTEQQDQEGKAGLEAIGNQKDTDEKAVSTEPTDAAVVPRSHGGAGDNGGGDDSKHGAGDDYFIPSQEFLEAERMHSLSYYLKYGGGEETTTGESENRREAADNQEAKKAESSPNAEPSDEGNSREHSAGSCTNFQCKRGHICKTDPQGKPHCVCQDPETCPPAKILDQACGTDNQTYASSCHLFATKCRLEGTKKGHQLQLDYFGACKSIPACTDFEVAQFPLRMRDWLKNILMQLYEPNPKHGGYLNEKQRSKVKKIYLDEKRLLAGDHPIELLLRDFKKNYHMYVYPVHWQFNELDQHPADRILTHSELAPLRASLVPMEHCITRFFEECDPNKDKHITLKEWGHCFGIKEEDIDENLLF

SEQ ID NO: 764 - protein, 135 aa, Mus musculus
MASLKDLEGKWRLMESHGFEEYMKELGVGLALRKMAAMAKPDCIITCDGNNITVKTESTVKTTVFSCNLGEKFDETTADGRKTETVCTFQDGALVQHQQWDGKESTITRKLKDGKMIVECVMNNATCTRVYEKVQ

SEQ ID NO: 765 - protein, 150 aa, Mus musculus
MQVLTKRYPKNCLLTVMDRYSAVVRNMEQVVMIPSLLRDVQLSGPGGSVQDGAPDLYTYFTMLKSICVEVDHGLLPREEWQAKVAGNETSEAENDAAETEEAEEDRISEELDLEAQFHLHFCSLHHILTHLTRKAQEVTRKYQEMTGQVL

SEQ ID NO: 766 - protein, 371 aa, Mus musculus
MAELQEVQITEEKPLLPGQTPETAKEAELAARILLDQGQTHSVETPYGSVTFTVYGTPKPKRPAIFTYHDVGLNYKSCFQPLFRFGDMQEIIQNFVRVHVDAPGMEEGAPVFPLGYQYPSLDQLADMIPCILQYLNFSTIIGVGVGAGAYILSRYALNHPDTVEGLVLINIDPNAKGWMDWAAHKLTGLTSSIPDMILGHLFSQEELSGNSELIQKYRGIIQHAPNLENIELYWNSYNNRRDLNFERGGETTLKCPVMLVVGDQAPHEDAVVECNSKLDPTQTSFLKMADSGGQPQLTQPGKLTEAFKYFLQGMGYMASSCMTRLSRSRTASLTSAASIDGSRSRSRTLSQSSESGTLPSGPPGHTMEVSC

SEQ ID NO: 767 - protein, 780 aa, Mus musculus
MAPYRSSLLCALLLLALCALSPSHAATTSRGRAQERAPQSRVSEARPSTMVVEHPEFLKAGKEPGLQIWRVEKFDLVPVPPNLYGDFFTGDAYVILKTVQLRNGNLQYDLHYWLGNECSQDESGAAAIFTVQLDDYLNGRAVQHREVQGFESSTFSGYFKSGLKYKKGGVASGFKHVVPNEVVVQRLFQVKGRRVVRATEVPVSWDSFNNGDCFILDLGNNIYQWCGSGSNKFERLKATQVSKGIRDNERSGRAQVHVSEEGGEPEAMLQVLGPKPALPEGTEDTAKEDAANRRLAKLYKVSNGAGSMSVSLVADENPFAQGALRSEDCFILDHGRDGKIFVWKGKQANMEERKAALKTASDFISKMQYPRQTQVSVLPEGGETPLFKQFFKNWRDPDQTDGPGLGYLSSHIANVERVPFDAATLHTSTAMAAQHGMDDDGTGQKQIWRIEGSNKVPVDPATYGQFYGGDSYIILYNYRHGGRQGQIIYNWQGAQSTQDEVAASAILTAQLDEELGGTPVQSRVVQGKEPAHLMSLFGGKPMIIYKGGTSRDGGQTAPASIRLFQVRASSSGATRAVEVMPKSGALNSNDAFVLKTPSAAYLWVGAGASEAEKTGAQELLKVLRSQHVQVEEGSEPDAFWEALGGKTAYRTSPRLKDKKMDAHPPRLFACSNRIGRFVIEEVPGELMQEDLATDDVMLLDTWDQVFVWVGKDSQEEEKTEALTSAKRYIETDPANRDRRTPITVVRQGFEPPSFVGWFLGWDDNYWSVDPLDRALAELAA
